United States Patent Application Publication US 2020/0246396 A1 - sequence listing, part 2

SEQ ID NO: 2 - DNA, 5444010 bp, Clostridium immunis (residues 1,814,671-3,629,340 of 5,444,010)
ttccaatgcgtgaagcagtggattatccagcgttttcgccgccttgcttgcaggagcttttgcctgcggtgtagaaatgtcgcagaacaccagctgggtcagcttgtcagcttcgccatcccgccagatctgcatgatgttgtccacgcactgattgacctttgtgccaggttcatccggcagcatctggttgacgattctctggtccaggcccagcttacggccatccgaggtaatcttgagcatattgtcttgggacgggtcaacggttccgctgtgtaccagcgatgcgcgctccgaaagggtcttgaccatttcctgctgatgttcggtgggctgtgccacgatgttgtggtattccacttccggggtaggcagattcagttggtcggcagtcttgatgtccgccacttctttgaacaggttcatcagctccggcaagttgaaaaacttggagaatcgagtgcgcgcccgatagccggtcccttccggggcaagctccaaagcggtcactgtctcaccaaagcgactggcccaacagtcgaaatgggtcatgttcagttcttgcaggcggtcatactggagataccgttgcatggtgtaaagctcggtcatggagttgctgaccggggttccggttgcaaagataacgccacggtttccggtaatctcgtccatatagcggcacttggcgaacatatcgctggacttttgggcatcgctggtggagagacctgccacattccgcattttggtgtataaaaacaggtttttgtagttgtgtgcctcgtccacgaacagccgatccacgcccaactgctcaaaagtcaccacatcatccttgcggccctcggcctggagcttttccagccgcgcctccagggatttgcgggtccgttccagctgcttgaccgtgaaacgctcgccgccactggcctgtacctctgcaatcccctcagtgatctcgtcgatctgttcatagagaagccgttcctgacgctcccggctgatggggatacgctcaaactggctgtgtcccatgatgatggcatcataatcacccgtcgcaatacgagcgcagaacttctttcggttatgggtctcaaagtcctttttggtggtgactaagatattggcggaaggatagagacgcagaaactccgacgcccactgctcggtcaggtggtttggaaccacaaaaagagatttctggcacaagcccaagcgtttggcttccatagcagcggccaccatctcaaaagttttgcctgcgcctacttcatgtgccaacagggtatttcctccatacagcacatgggcaatggcgcttttctggtgttcccgcagggtaatggccgggttcatgcccccaaaagtgatatggctgccatcatattcgcggggacgggtagagttcatttcttcgttgtactggcgcaccaaagtctggcggcgctccgggtctctccagatccagtccctaaaggcttcccggatcgcctgctgtttttgagccgccagggtggtctccttggcgttcagtacgcggcgctcttttccgtctgcgtcctctatggtgtcatagatacggacatcccgcaggttcaggctgtcctccaaaatcttgtaggcattggcacggctggtcccgtaggtggtataagctgccacatcgttgtaggatacagaagatttccccttgatctgccattcagcggtaaaggacgaatagttgaccccgatactgcgctggagataaaacggggtattaaaggtctcatacataaactgctggatatattccttgtcaatccaggtagcgcccagacgcacctcgatctccgacgcatccaggtctttgggctgggcggcggtaagggcttccacattgactgcataaaccgggtcctgctgtgcggcccgctgcgcctgacgcagtttgcggcgtacattgccggagaggtattcatcagcagtcacataatggggtgtgccgtctttctccagctgtcccggtacacggaagattacgccttgcagctctccggccagttcttcttttgtttttccggtaagctggctcatatagtccatatccacgcaggctttttccgagatggacaccgccagtgcttcacttgccgtatccaccacagccaccgcctgatggggcttgatggtccgcttggtgaacatatctgccttgcgttccagctttccgtcctcgtcgatgacttccaacgcacagagcaggtaataggaagaatcgtctgcataggccagacggtttgcacggtcattgatgagaccgtatttggaagaaaagctgtcatagaggctgttcagttccgcctgcttctcccgaatggtgctgtccggaaccgctgcatccatctgaaggtcgatcagttcctgcacacaatcacgcagtcccacaagaccttttacacgggcttcggcggtggcgttgaggtcagggcgcaccatacggctgttttcccggtagtacacctgcccgtctacaatggcataggaatagttcttcacattggggtcggcaggaatggaggtgtcaatagcttcgccttcgcccagctccggcagctctgcctcctgataagtgccatgaatatacttcaccgcatcatgcagctggtcggaaagctccagtccctcgatagggttcacggtgtagtccataccatgagcagtgcttaccggctcctgtctgcccagcaccatttctgggtggtcgataaaataccggttgatggcaaacccgtcctccgtctgtccggtctgggtccattccggcacgatgtccaacgggcggtcccgcttttggaggaagatgatgtccgataccacctcggcaccggcattctttttgaacgcgtcattaggcagacggatagctcccagcagctcggcacgctgggcaagatagcggcgcacggtggaatccttggcgtccatggtatatcgagaggtcacaaaagctaccacaccgccgggacgcacctgatccagtgctttggcaaaaaaatagttatgaatactgaaattcagcttgttgtaggctttgtcattgacctgatactgaccaaaaggcacattgccgatggcaaggtcaaagaagtcacgcctgtcagtggtctcaaagccgcctactgtgatgtccgccttgggatagagctgctttgcgatgcgcccggaaacagggtccagctccacgccgtacagacggctgtttcgcattttctccggcagcataccaaagaaattgcccacacccatagacggctccaaaatatttccggtctcaaatcccatacggtccaccgcttcatagatggcctgaatgaccgtagggctggtgtaatgggcgttgagggtagagcttctggcggcggcatattcctccggggtcagcagttcttttagctggacatactctaaagcccatgccggtttctccgggtcaaacgcatcagagagaccgccccagcccacatatcgagaaagaacctcctgctgttcggggcttgcctgctgtccggcagcttccagctctttcagcaagcgaatggcattgatatttgcctggaacttggctttcggaccgccttcgcccaaatgctcatcggtaatgcggaagttttttgcattgcggcgcaggttagccttgtattcctcataagatgcttcctcggcagctttggcattgggaaaggtctgccactggccattgacctgaatggaaaccgggtgttcatccaacacttcctcaaaggttttctccggctcagtcacaggggctggtggctccggctcctcgatatgcagtcgttccaccaccacatcataaggcagattgttcttatcgcccggatagacggccacggtctcggaatggaaggccggggattcggcagccggttggggctgttcctgtccaaaaccgtcctgctgacgggcatacatcccgcgcagcaaaggcgcaacctcatcccagcggaaatacagcatagccagacgcttttcctctgcatccatgacttccagttctatgccctgtgccgtggtacggtaatcggcaatatcgccggtctccagattcagtgtctcgatctcaccggaataggctctgctcagccagtaggcgatctcgctgttgctcctgccggattgcagcagcgtggaaatctgctttttatccgcttcatccatcagtccatgagccaatacatcccgcaagtcctgatctgccttgtccgggtcagtaggaagaaactcggtatagtaagcattgcggcggtctgcccgaagcagctgctcgaactgttctttgcgctctgcccggtagatgggatataccatcccggtgggcagaagctgtacggtgtcctcccgcagctcggtgatctgataggcgtcatcctcgatatacacggtatcgcccacggcatagaccggggcagcagggtcataggatgttctttgcggagttgggcggcgaactgcatcatattcctcatcggaaatagcaacttcggaagtctgctctgtctcagcagctgcgatctgctctacatccgacatcacctgttggataaacggggcattgtccagtttttccgtgtctgccacctgtccgttgacgatccctctttcttccagagcttcccggatggcgatggggtcgatgtcgtcaaaacggtcctgttcttcttcggtatagaaccggtcctcctgaatgagctgggcaatccggcgctgtaccttcggccagggcagctgcgtttcctccgggctgccggcacggacaacgaacaggctgttgctgttactgccgccgtattcctgagccagccatgcggcggtatctttttctcttgcatggtctttcatatagcggacaacagcgtgtttactctcgatattgccgttccatgcacaaagggcagtatcaatatcttcctgagaaagagggcgcagaagctcatggagctttggataggtctcgtcgatcacttcccggtgtaaacgctgacggaactccggcacatccgaatagagtcggatcagctccatatccttagaaccaaggactgcacggcgcacagcggcattaccctcgatgacagcattttcacggtcagaatgaccgcaggcattgcgatatgcggtatcctcggaaatggcggcagtcaccacaggcttatactgctcaaactgctccccaagggtaggctttggcgtttctttctccacctccggctgctgtgcttgaatggcatcttcttctgccagttccttttcagcctggattttgtcatactgcgcctgttcctgttcggtaagatagcggtctttctggacaagtgaggtaatgcgcttggcaaccttttcccagttcaagtgaacatccgggcagtcctgctttttatagtgcagtcctttcccatcgtgatcttcgccgctgtgtgttgcaccggacaaggcatgagagcgtccgccaatgccatactcgtctttgaggaatcttactttctccttatccgtatggttttccatgaagaacgcatagatacggccttttcctccggcgaaactgcttccgccggtcatggcggcgtcgatctcatcctcggtaataaagtgctggacggttggcacttgggaaagctctgaagaaaaggtcctgcggggcaggtcaaggtccttcaggttctcccagatctccctcggtctatgatagtgaaaacgcaacaggtcacggtcctgctgataggcagtccagaaggcagcgtattcttccttgagggtctggcggaaagccgggtcaatcagctgctccgtcaggcggcgggtctcctctgggaaaccattgcctttgatctctgacaggcaggacaaatatccggcttttctggcgtcctcactgagatcgtgatacagatgccagagcttttccgagaggagggagcgttcatagcctgccgcttctgcaagctccacattggaggcaaactgaccactttccaaaagctccccgatacgctctgcggcgcgctcccaagaaatgatctgggcagacctgtcataacggacagacttcccgtgggaaagatggataccatcctcggcataccatgcactcacactgccaaggccgttgccgccgtggtacagcgttttcagtatctcggcaatctcagcggtggttttctgcttttcaaaggctgcaaccacacgctccctctgacggtctgtattgcctcccaaacgcagcacatggtcaatgtcattttgggcaaaagaaaaagcagaggatgtatgcgctacattctctgcttcatctatggattggatctgttccgcttcggagaggaacaggtttagagtcagctgttgataagctccgccatcaggatttcctcggcctgggctttgcaggtgttcatcagccccacccacttcatgggatcgctggctttcagttcctcggtggctcccgcttccttcgccagctggggcatcatctgctccagtctgctctgggcggtctcgtcgatctccagaaggtgcgggtacagcttctcgctcagcaacatctggttgtagaggatgggacggtgttccttcaggtaggttttcctcatccttccgtacttgcccaggggtttctccggctgctggctcagcttcaggtcgggaatcagatagtctccgttctggatataggtcatgggattgttcatcttgtttgctcctttcttggttggcttcgcgctctgcatttcggacggtaacgccgatctgccgcagcacctgctggttgatctggctgaccgctgttcccagcgctccgatggttgccggagtattgaaatcaaagatcgccatgaaatcttcgtggtcgaagtagcgttccggctccagtccacagcgggacatcaaagcgtaagtgatactgacggtggctgctgccttgaactgtactccgatgttaaactcatcatattcctccaaaaaggaaccgtcaacgatatagaagaagtcctgctgatgctccgtccagtattcctcagccagttttccggctacctcggtgagctgtccggcaaggtcatcaccggaaacatcataggtgcactcaagcatggcctgcaccgaatccaaatggcgctcctccagctgccacagccagggagtgcgggaatgttcacgggttccggtgtcggaaatatcaaaaacatagcgcaggcggggcctgtccccggaatcgtccaccagagcaattcccttggagccgcgccttacataccggcccatcttttcattccacaaatcgtactctgcacaggcggtggcgtccggacgctgggcgtagatcatcaactgctcatggaacgggtacttgtaaaggcgggaagcagtggtgagaaaccctgcccattcctgccagctccccgtgagctgcgttgttaccttctccgccatctgtgcatatagttcagctttggttggcatagtgttctgtcctcctttcagttttggggtaaaaaggtggggtggcatattgccaccccatccctgcgattatagtgtttactggtcaaaatccggatacaactccagctcggcaaactcggcatcactcatggcctggagcttgcccagtgcgctgtctgtcaactcccgcagctcggtttcctccggggccagctcgccgcgcatctcacgcaggctgtcgatcagtccggtgcggctgccggtattgtaaatgcacatcaggttcatttcctcaaaagtaaagtttcccatatcaaatctccctttccgcactcttttttggcgctatctttttgtgttctgccttgggctggcttttcagctgctccatgacggactttttcttttcccgttcctcccgatgggcagcggcagccaaatccatgagggaaatgggctgaccgttgcgggcctgctgttccagctctgccaccgtaggctcttttgcgccattgttgatgataccgtcgatcatgccgtaatcgtcctccacggccatctccgcatttttcaacggattttccggcaggaatccggggatctgggtaaaaccaacactgtcacagtaatgacaggataccttaccgtcctgcttgatcgcaacgatgtcactgacactcatagaaggactgtgaaaatccgccggcttttgcagattaaactgctcatatagtttttccagctgctccggtaccgtgccagactccctcagcggagctgtgtaaatgaggtcataattgctgcggtctatggaaatgtcatgggactttaaccaatccagattcataaagcgcacattctgcggatcgtcacggctcacctgatagatagcaaagcaatctctgttctgggatagaaatgcctgttcgcgttcctgctgatgttcctgacgctccatgaccttttcgtggaactgagggcttttctcccattcctcacgatccacgccaaaaagaccgccatgatccatgatttcctgcgggtcaaacaccatgctctccgtattgtcctcatgcagcacataaacggtcaaaccggcggtatccagttccagcgcccgttctctggtaacagggaacatcccatcataggagtagccgtattcctgcatatctggtgtggagacctgctcatccggcatggggtattcatccagtgcctgctcctgcgcttccggcagctgggcagaagcggtcatctgacttgcctctgcctgcatctgctcataagcagcttcctgcaaggtctcaaccatagacaagggagcgcgtctgagcgaagtgctgtccagatcgttatcatcacaaatctggagaactgccttcatgcgggaaagctccggcatatccagctgaccaccatccgtctctttcatggttgcggcatcataaagggtatagtcccagccactgtcacaggactggatatgaagataggtggcatcgtcgatcagaaacaaggcctcctgctggttggcatctgctcccaccacctccatttccggcatggccgcagccagttcctttaccgctttttgcaccaacggattatcacggtaatagtcgattgcctgaatggtgtccaggtcaatggtctggccggtcaaaatcggaaaaggtccttcatagtcgcttccgtctttcagctcaaaaccaatgcccttgatcccgttcattcgttctgccggaatctcctgataaatgcggattgcttcctccaaagacaagttatcgtggtattctccgaggtttggaaattccatgcactctgctacatagtaagtcagattgccggttggctgtctatcagataccttagcggcatctgctggctgctctatcggggcggtttccggctctgcctttgcatgggggtcaattccacgctctttgcagatttccttatagtggcgctcaatgtcggagatcaaagtgccggaggttttgttgatggtctccaaactggctctcagctctttcagctccttgccctgactccagcttgcaatatagccaaagctgttttctcctgtctcgatgccaaaatatttgcagactgcgtaggagatgctttcagcctccacttcctccgtgtggcgatctttcctctgttcttgcaaaaactgggcgagggtagaaaagccgccaacaaaattcagtccttcttcctcggtcagcatcaggcgtccatcttccgccatatccagcggctctgtcagcagaacggagcctgcatggtttacaaccactcgttcttctacacagaccggctctccggggtcgtagtcagagccacgcaggtcatagcaataaacgccctccggcagattatcacggacaatccgcccattggagaacagaccgggtttatcaaacagctcgatctcctgatattgctcgtcattgtcaatctgaacctttttctgattatggagcttgctgtgggcaatctcgtgaaccgtggccgaaaccgtctgcacctcgctcatgccctgacgaatggcaattttctgatgatcggcagaaaaatagccgtccgtatcggcggccattgcttcaaaagtgatcggcaccggtgcgctgcggcgcagggcctccatgaatgcctcataatttggcacattgccggaaagggaggaagcaagctccggcaaaggtttcccgtcggtctgactcacatcaaaaaccttgaccgggcgaaacatggggatctcgatttctttttcctctgtaacgatctttccgtctttatccaaaatcggagccttggtatccgggtccagcttctgctcctcgattttcttcttgtacggtgtgggagcgatgatggtaatgccatgctcgcccttttttacatgacgctcaaactggtctttccacttattgtatccggctaccaaagtggcgtccggcttctgcatatagatgagcatggtgttgtttaccgaatagcggtgaaatcgggacatgacggacagataacgcatatacttttcgctttcaaacaattctttgataccctgctcgatgccatctgtgatttcccttagccgttctcggttggtgggtttgttctcagccatgattttcaatctcctttccaagtgtgtgatttctgctgtgtgttccgcaatccatgccttttgttcttcttcactttcataaagaaaaaggtccagcaggtactctacataggctttcttctggattgcttccacaaagcgggggtgcggttcttcctccggtgtcctgggagaatggtcaatcccccattttttcagcagatggtagtaatcggacagtacgcgatagcaccgctgccggtcctcccgaaacttttgtgcctctgttttctgccggacatatctcctacggggaggggcctgactgtcatagatcaggccaaagtcctgtgccagtttctccgccgcttcttttggggagaggtcaaagagctttgcggtaaagtcgatcacatccccatcttcaccgcagccaaagcagtggaaccgctggtctaccttcatactggggttcttatcatcgtgaaagggacagcaggccatgccagttcgactgacttttatcccgtaaaacgctgccgcatctctggtgctgaccgattgcttgactgcttcaaatacattctctgccatgtgcctttaactgccagactttctcacagggggctggtatccggcggctttcgcacgctcactggcagctttgcggcgttctgcgctatatggctctcggactgatacacaccgcttagggacggtaaagttatgggcgtcctttcggatgatctggtcggggtgcttttttgccagcagatccagcttctccatcagacggggatcatgagtatagatctcagccattggttctgcctggttatagaggagaatggtttcccgttccactaaagagagcttcatcggctgcctcctttccgctggtcaaattccagcttgaagttggcgtactgtccatcgtcctccaaaaccacagtggcatcgtaggtcttgccagttttctccgaatataggcccattacacggacacggccatcgttcagcagtgcagacaccacagccttggtgggctgttttttcttggcagcccaccatttgttgtttttccagattgcaaatttgcaagaatcattctgacagaagaagcctttttgcagttctgcaacttcaccgccgcagcgagggcatttgcctaccacctcacggggcggagtgaacaggtactcggttcccttgatgacctgataagtccccaccagatctctcagcatggtgctgattccatccaaaaactcctctggggcaagctgcccgcgctcgatctcgcccagacggtactcccactcggcagtcaaaagcggagattgcagctgttccggcaggacggtgatcagggagactgcatcgtgggaagggagaagctgcaccgttttcctgctcttttttcgttccagaaaaccggcagataccagcttttccaaaataccggcacgggtggccggtgtccccagaccttttcgctcggcatcctccggcatatcctcttttccggcagtctccatcgcggacaatagggtgtcctccgtaaagtgctggggcggactgcttttgccttctttgacgattgccgcagaaaccgaaagggtctgtccttcggtcagctccggcagggctttctctgcgccatcttttttcggctctgcatccttcattttggcacggtaagcgtcctccagtgctttccatccggggtgctttaccgtttttcctttggcggtaaactccccaccggcacacgctgcaatcacaacggtttccgaatagatatggggctgggctacggcgcacagcagacgcagggccaccagctccagcactgctttttctcccgcaggaagggcagaaaggtctgcatccttgagatttctggtagggattactgcgtggtggtcagttactttcttatcgttgatgaccgtctgcggatcacaggtaatggcgatccctttgcgaaacggcatagcattgacaaccagattcaccagcaccggcaggctgtctgccatatcaccggtcagatagcggctgtcagtacggggataggtgcagagcttcttttcatacaggctttgcagatagtccagggtctgctgggctgtaaatccaagcaggcggttagcatctctttgcagagtagtcaggtcatagagggccggcggcttttcggacttttccttgcgctccacctttttgattgcgacagctgcaccctgacaggcttctttcagccgctcggcagcggtcttatccgccatgcgctccccggatacggtaagaccgggcagttccagcgccacggtataaaagggaaccggcttaaaggtgtcgatctcagcttctcgctggacaatgagtgccagtgtcggggacataacgcgtccgatgttgagtgtgcgatgatacagcacggaaaaaagccttgtggcattgatccccaccagccagtcggccttggcacggcagagggcagcatcacgaagtccatcatagtccgcgccggggcgcaggtttgcaaagccctcccttatggcggagtcctccatcgaagaaatccagagccttttcatcggtttttgacagcctgccagctcatagacgctgcggaaaatcagctcgccctcgcgtccggcatcacaggcatttaccacctccgtcacatccggggcgttcatcagctttttgagaatatcaaactgctttttcttatcctttcccaccaccatctgccaatgctccggcagaataggcaggtcatcatatcgccactttgcgtacttggggtcatagctgtctgcgtccgcaagaccggccagatggcccacacaccaactgacacgccagccgttgccctccagatacccgtccttgcgggcagttgcaccgatcaccgccgccaaactctgggcaaccgatggtttttcagcgattaccaatttatactgagccatgatggttcctcctctcattaaatcatttgggtgttttacagcaaaatatatctataatgaagttctttaactctgataccagtggtgagagagtagtagaagtacatcaaacagagaagaaggacggaaactttttccgtccttctgtctgcacatgattgttacttttcagtttcctcagtttcgtcagcctcaatatcttcaacatcagtatcaaggacttcttcatcctcggtttcccattcctcggaatcttcctcgccataatcataatcgtccagactgtcattgcccttggtcttaggcttattcttaacgagcttcaagtaggcaaatacgccaccgccgcccagcagagctagcagaaggatcagggcagccgggttcagtccggcaggcttctctttttccggctccggtgtttctgccagaggttccggtgcttttcccgtacatttactcttatcagttacacagaccgggcaggccgtattaactgcccctgcttcacatttcttcgtgcagctgcacacagctggcggctcctctttggcatttccatcttccatcagcgccatcaggtccgcttcatccacctggttcagaaagtgaacagcagtctttttatcctcgttggccctgtcgatcaggatataaaaatagttgcctgccttggtggtaacggtaatgagctgcttgttgccaccaaaatcatccaccagagcagcattgccatccggggtcagcggaggtgctttttcgggttcttccaccaccacattgctgtcattggtggtatcctctgccggggcggcgctgcgccctgggcaaaagcgggaacggtaaagcccgatgccagaaccagcgtcaggcaaagggctgaaagtgttcggagcaatcgtttattcctcatagctgttttcctcctgttcgttgttgtcatccaccatactgccgggaactatgcctccggacagcatggcgcttagctgagccggggtcatacgcagggcgcgcaccatctggacaatctccagattttccgcctcggttttctgtgcctccagcgccttgagcttttcctgatactctgcgatcttctcgcgaacctttgtaatctcctggtcaatgcgttcaattttgttctttgccatcgtctatcactccttctaataaatctcggttaccagttcatcaggccgtagcccttaatgctttgataattcaggtcataactcttgatcttgcaggcatcgccggaatttccctccacggtataaacacggctgccatcggtgccgacaacaattcccacatggtctgcggaaccatccagatcccaatcgaagaaaatagcatcaccgggggcgatgttttcatatcctcgtgcgccccactgtccatgagactggaaccacggaacaccctgagactgacaaccagcaaagcgtggttccgttcgaccggattgaccatagcaccatgatacaaagcaggcacaccattccacacgggagtcaaagccgtaccagctccaataaggttgtcctcccacattgcccacctgacttttcgctagttccaccagctgcggattgccggggcgggtgccattgataaattcaacaccagtcaaatcttcagaaacacctgtatcgggagaaccgccaccaaataacagcggcttattgcccatagtctgtcggtagacctggtacatctccatctgctccggagtcagtagttctggcgcaagagaggcaatggaacggcttgttaaagttacatggagaatacgatattcatattcatgctcatcaccatcttcgtcagtgtaagtgcgaatctgaatttcttctctcagcgtaagctgatactgtgcatcaaacacacgatccagctctgcctgtgcgctgtggcgtgtatagccttgcaagacagcagagagaactgccgccagctcatgggggtcatggccaatcatatccaggttatagcgatactcgtcataccctgggtggctgctttcgatgttgtcgattttctcctgcaaccgagcttctctgtctgcataatctgcctccaccgccagcatttccgagtcatccgatggataggtagtgccggaaattacagaaccaatactctgtgccatcatagagcaggaggacatggtattcatcagcatacaggcgatgaggaacaaaacccctgcgatcaggaagcccttcttgtggcgcatgacgaatgcccctgtctgctgtgccttttcttttaccgtccttgcggcctttccggttttggacgcagcctgggcggtatttccggcagtctgaccggtgcgcttggcggcagcatactgctttttgatactctgtttttgctgccagcgggagagagggttgctggcaaactgaggattttcccgtagggacttctggtacagggcatttacatttgccttttccagcttctgctcggcctgggctgctttgcggtacggcttcagcttgtggctacgatagccctcccgcaccagataagcgctggtctccaccgcctcctcggacttgtgggcgctttccacgcccacattgtcctgttctgtttcccggatctctttgtgaaacttgcccgcgaccagatggacgggagcttccttaaccccttgagaaagtttggaaggtggttttttcttgtcctcaaagatcagcttcgaggtctttttcccggtgtccgggtcaatgaccgtctgtctgacttttttctttggaatattggcctgcgccttatctgctctggccgtagctttctccgttttgcggatcggcttttccagtgcagggtcagcccgttcctcatcagtaaagcgcaggcgcggctctttattcaaaccaatcacccattaggatagcatccatcatgtggtgcagctccacatagagggccaaaccttccggatcatatagcggatgcacggtgagatacgcatggacttgcgccagaatctcagagagcattgtgataggtctgcaccctacaatggttgctgcaccaggggcacacatcatattcgcccaaatcgaaaagagacgggcaagaccaatttcgccatcctcattcaaggttttgagttctttgtcagcggtacgacactcaacaacagcggaggccattaccggaagcaacatgaattcgtgagcctccaatgcctcacggaaaaaaatcatggtatcaagttcgcaaatattctgtttcatagttattcatcctcctttttcagttcctggggtttggtggtcataatgcggtaaagctcggtattcttcgggaagtggtctacaaacggcaggatcgtagagccatagaacagcagaccctcgccctcaccggagtgggtcacatagctaagctggtgcgtggaaatacccagctgcttggcgagaatctgacggtctccgcctgcctggttgagcatatacacgaagtccgagttttcaaagatgttctctacctcacggctggaaagcagatctttgacattctgcgtgataccggtggggatgccgccccattttctgaatcgcttccagatttccaccgtataggcagcggtttgctcctccttcaaaagcaggtgcatctcgtcgatgtagtaacgagtggatttgtgggcagcgcggttaatggtaacgcggttccagacctgatcctgtaccaccagcataccgatctttttcagctgctttcccagctccttaatgtcatagcagacaatgcggttattgatgtccacattgctctggtggttgaacacattgagggagccggttacatagatttcaagggccgtggcgatatactgggcttccttttcctcctgtccccggagcaggttatataggtcctccagaatcggcatattctccgggcgcgggtcattgagataggtctgatagaccagacgcacacaacggtcgatgatggttttctgcaccggctgcaatccgtccttaccgcccacgatcagctcacacaagctgaggataaagtcagacttgagagacagcgggctttcatcatccgagtagtccaggttcaggtccatcggattgatgtagtttgttgaggtaggcgagatcttgatgacctgcccatgcagacgctcaacaagaggtgcgtactccgcttccgggtcacagatgataacatcatcactggtaagcaaaaagcagttggcgatttctcgttttgcactgaaggacttaccggaacccggcgtacccaaaatcaagccgttggggtttttcagcagctttcggtccaccatgatgaggttgttggacagagcattgatgccgtagtacagggcttctttgccgttctgaaacagttcctgtgtggtgaacggtacaaagatagccgtagaactggtggtcagccctcgctggatctcaatctgattgagtcccagaggcagacagctcatcaagccttcttcctgctggaagtccagcctggtcagctgacagttatacttctgggcaatagagcctgcctgaaagatgttgttgcccagctgacggggattgtccgctgtgttcagcaccagaaaggtcaaaaggaacattctctcattgcggctctgcaaatcctgcaagagttttttcgcttcactgccgtaggtagcaaggtcagatggaatgatgtccatgtcgtatccggcacggactgcttttttctgttcctcgatcttactgcggtccaggtcggtaatctttcgctttaccgttttgatggctttcacctgatccaccgactgaatgtgcatactcacaatgagtgagctttccatatccagaaaatcagccagcagacggtcattcagctccggtgcaaggatctgcaaaaaagaaacagccccgtatttcttgcccatacggaactgcttgccggtgcggaactcaaaggagcttggtgcaataaaatctttcgtggacagaccggaaggagccagccagtcccattcaaactgaaacgggagctgttcatccatgtggaataccgcatgaagctgggaaagcctttccttaccgtccagtgttctggcggctacgccaagacgcttgaagttgttgagtatatcggtctcaatacgctccagacggggcttggcagctttgatactgtcagcgtcgataccaaaggtcaggtatttggtcttgatgagaccgttgttgcctctggccagctgattttgcagcatcgtggtgtattcctcacggatactgtcaaaggcatctccctggggagggatggaaatggagtttgcaaatgtctcctccgatgccgcaaggttcaaaaaagacagctggaagtgaatcgagctgtcgaaataattaaggaaatcacaccagccctcaaagatcgcggtcttatcttcattttgggagagctgatagttgatgtcctgaaactgaatggtctttgtgtagtggctgtccgatacgcggcagatcccgtctggccacatccgttcataggggatactgtcctgtgccgattttccttttttgtccgtgcggttggcgcgggcaatggccgcttcgatctgcttcttatcggcgcgggacagctttttctttgtctttaccggctgcacggtcttttcttccggttttcccagcagacggcgcagccagcttttcattgcggtgaacaatgtcatacacctccttatcgagcatttcctgccgctttaatacggcataaaagttgttggtctggtagggacgctgcttgggacggatcacagccactttgaggatgttgcccacgatcttttccaggggctgtccatgcttttcatacattgccagcaggaagaagggcatcatgaccagcatcatacacatggcggccatgctgtttcccgcaggctcacggagcaaaaagaacagcggcacgcctacaagcgccccagcggtaaagcagaccagctgccttcgggtcagattgaacatgaccttggttttgactttggttaaatctttgggtacgggtacataagccaatgtggaaacctccttccgttttaatgcgcctgaaagactgattttgcgagactgccggttttgaacagcgtaaagcacagcagtacagtgtagcccacgcagctccagatcgccatgatgatgtcatcttccagagcgatgttctgcaccagtacagcataaattgccacgcagacgatgatgagaaacgcctgaaagcccagcgccagcagggagcggaggtagttctgtcccatcccgccccattccttgcccatcatggcagccatcggaagcggcgcaacggatgtgacaaggtagatctcaatcatacggccataaatgacgataaagatacagatatacagcgcccacatggtaatgccaataaagagggactggaaccaaagcccgaacagcggtcccagatccatttccatcagcctcggttccagatcggtcataactgaggaaatgtcaatggacgcatccgaaccgatgatccctgctgcctgcgctactacgctctgagccatatcaaagacgcccatcacaatgttccatgtgttggtaacaagcaggatagcggcagcactcttgaatacccacttgaaaatcatccaggtatccacatcatgcagattgttcttgtctgcaatcatctggatcaggtctacggtcatcacaatagccaggatcacgcctgcaatcggcaccataatggagtttgacaggttctcaatcatgctgaaaatactgccattccatccctgtggtgtctggcctacctgtacggatatatccgcgacctgttggtttacgctgtcaaacatccccgaaaggttgctcataataccgcccaccagcatttctttcagccaatttgtcagggcttcaagtaagaaatccatacggtgtcaacctcctttccgccgccccgcaaaactgcgggagcggcaaggatttcatgcggggacgcttagacagagaaaagcccggagagcagaggtacaaggaccatgccgactacggctacaccagcgccggccatgagctgcttcatgccctgggattttgcaccagggttgtcgttgccgtaaccttcgagcaggttgataacgccccagataccgagaccggcaccgagcgcgataacgagggtctgaagaacggtgattgcctgttcaaaaaatgccatatagtttgttagccggaatctgattaaaaaataggtttgtcatatttcataggcatacaaaagccggaacaatctgccgcccggtttccgggggcatgattccggctgtcctcctttttcattattttttcttgcgattgtccgctttgtacgccaatggcccgtagagggcaggtgcggcgaatagataagatcactcccttcaaaagcggaacgaagttaagcgccctttgtgtctacttcatatacatcgcagacctcattgggcttgagtttcagccttgcggacaggaatgcttcaatgtcaaaagtgttcttgtcgtccgcgtcggcagtgtacttgaaattggggtgcttggtaatgtcgtacttatccgaaaggaaaggacgcacaccgcgcagctggaggatacacttgccgccatccataacagcaagctcatcctggctcatcagctctttccccaatttttgatagttgagagagtgggaagtttcccggccacggctctctccggtgttgtaggtgtcgatggtttccttgcccagcacggcagccagctccttgagggtggttggctccttaccgcccagaaaaatagaagtatccatgttgccgatgatggtatccgcattgtccttatagatcgccttgagctgactctgcgcctgcaacaccagacaggcggagatctcacggcttcggatggtagcaaccagcttttccagcttagggatttgcccgatattggcgcactcatcaatgagacagcgcacatgaactgggagcctgccgccatacacatcgtcagctttttcgcaaagcaggttgaaaagctgggtataacacatggagatcaggaagttaaagctgtcatctgtatcactcataatgaggaacagagcagttttccgatcccccagagtatccagctccagatcgtcataagccgtgacctcacgcagctctgcaatgtcgaatacggcaaggcgcgcaccacaggaaatcaggatcgacttggctgtttttccggcggccagcttatatttcttatactggcgcaccgcaaagtggtttggcttctcggcttccagtgcatcaaacatcagatccacggggttcttgaactcctcgtcatcctcacggacttccatggcgttgatgaactcgatgagggtggagaaattctgctcctccaccggagcctcatagtggatatagccaatgagcgcgcagtacagcaaggtttctgcttttacccaaaaatcgtctccggccttgccttcgcctttggtattggcgatcagcgttgtgaccagcttcaagatgtccttttcgctatggatataggcgaaagggttatagtgcattgattttcggaagttgatggtattgaggaccttgatgcggtacggctcataaatgaccttgccgtgcttatccttcataggctttccgtcctttcccagtttgggtgcgcccctttggagcattttcccgcactccaccaaaatggttccctttgggtctgtgaccacataagaactgtgcatctgcatcagattcggtttgagccagaagcgggtcttaccggaaccggagccgccgatcaccagcacatttttgtttctggcggtctttgggtccttggggcggctgttcatggtcaggctttcagttttggtcagaatcacattgttctgtaacaccgggtcgatgtagggagcaatatcctcacgggttccccaacgggcagagccatactccatgccgtgacggtacttcttggcgtttttacttttgagatacaccgcaagacgcaggccagcaccgcagcacagccccaccagcagatccaacgggtgcaggctgggccagaagctttgcagcgccccaggcaggacagcaaacagggaaaggaatttctccgaagcatttgccccctgagccagccgccacgcctccccgaagttggtagcaaacagccccatcaggagatagggcaggttcagcaaaacgagctttttgatgtcaagctgctttttcatcgttccagctcctttcgcttggtgcggtccaccacggcatttttgaccatctctttgaactgactgagttttgccagcacagacgggcgttccgttttctcggccttcttgacctttttgctggtgtactcggtaaatgcagcggtcagcgcatcggcgtcacggcccttgaaaaagatcaggtacttgggcggggagctgctgcggtctttcttcaccgcataatccacaccatatttccgggcgatcttctcaaattccttgatggaagggtctgtgatctcgatattggagatcccctgattctgaccaatgagctgcttgacggtctgtttgccgtggggtgtcacaggggcgtcacggcttctctgcttttgcagcttcttttccttgcagtgggccatgtacttgctaatggcggctttgagcagcctgccggtgaactttgttccgctgacaaccagcgttaaagtcctgttttccacttcttcctgcattttcatcgcctcctttcctcaaaatgtgcaggggtggtgcatttatttctaaggcgggaccaccagccgccggagaaggtatttcttcatcgaaccgccctcaacgaatttgctcagaaccgtcatagagcaaatctccatttctgacctttgcatgactgagaatcttgatctgtccctttgtctgactgtccagagctttttcatagcccttatctgacaaaaacaggcgggttcgttcacctttccagcccaccggggagtcatgcgtcagcacatcaaaaataatcatgtgccgggtgttctcagcaaatcgctccaaatccatgtactcatggccgtgatagttctgcgctccagctttctggcgcatttcttccatcagctgaccgattgttttgccttctggcataaaactcacttcctttcccactctcatacaaccatcaaaatcatgtctctcagctgagcaaagtagagtttgccttgcggggttatcagcgtataggagccgatatgcccgtgattacagtagtctttgacacaaaacagtccttcattggctggctttgcatagggcagtacattaccggatgcggtgcggtacacaaaacgcttttccagaaggaaacggacaaaccgacgctccgggacaagcaactctttggcggtggtgcggaggttggtactgtgattgaggtcgatgaacaaatcataaaaggctgccttactctccagcagggcattttcctctcgtagcgacgcattttcttcccgctcagcaagcagctcggagcagagctttatcagagcttccggagaagtggctatctcccacaacttctcttttgtgagataggctccgtgcttgcgaatggcaggtagaacttcatcaaacacccattgttcaaaccgttccgctgacggcagtttactatgggcgatcagacgatatagatcaccttcggggataaagagcatttcgaccatttgtaccgcggggcttccatctgcctttttcccagtctggacccctatggaacatttcgttccacccctggtatggtcgcggacagctttgcgtggattggtatatcccagcgctgttgccacatctgtaccgcaaaataatactttgccattctgttccaaagtgcgaatgcttccgaactctggactattgaaaatttcaatctgattcatgctgtgcctcctttggtgtaatacaaaagcgactgattaccagccgcctgcgtgcatatcgtgatttaccagtgaagtgtagtggttattcatggtggtaggagcgttgaacagcactgcaagcaggtactgcttgatgttgcgtacctgggtggtgttcttttgcagacagtccatgacaaactcgatgtgagagctgtccagcttcaaaaagcgggagcgtacaatctcgtgaggaaagtccgcaccagagatccgggtggtctttcgtttggcacagaccgtttctaccaacagctctacaatctcattcaggtcatccaggtagagaggataacgctgcttcagacagtcatactcgatattctccaaaatcaattcccgataattttctatctctgtgacagacatcgcatcccttcctttccgttccggcggtattgccgccgctgtttcccggaagggaagggaatcggtatttgatctatgagtattttgtttttgggtatttgatttcttagtatttaattgtgttggattttccggtaacgggtttaccgctgacgggtttaccgttatcgggttttccgacgacggcttatccaacatcggttctccctcgatgggacgctcaaaaatggtatactcattggctgcgaatttaccagaagcatcagttgtctgtctgcgccgaatgtatccggctgtttcaagctcattgacagcagagcggattgcatctttgctttctcgattgatatagctgagtcctgacagcgtataatcccagtcatctggcagagataacatctgcgacaagagaccctttgccttcaaagaaagccgtttatcctttagatggaaattgctcataaccgtgtaatcgccagtgcgttctacacgaaaaacagccatttacttcactcctttcatttctcaggtatgaaaaaagccgcaattcataagagaattgtggcagcggttagggtctgtctgtatcttttttcttgcgtcggtaggggcgttttggcattggtggtttatcaaacagatccctttcctgagaaaatggtaaggtttgaaaaacacggtcaatctcggtggattccatatcacgctgtgagcggcaatcttcttgaatagcttctcggatttctcttacagtacacatattcattcctttcctttcgttgtatcggttatgaacgacggtgttttttaggcttgaagtcgagaatatgcccctcaataacatgagcatatctcttaattttgatttctcgacgctgctggctttgcagagctgactgatacccgtcctctgtgagaaaaagcctcatttcgtcaccgggttctccataagcagtagggcgcaagacagtaaactcaatcatccagcaagtgctgtcccaaaatcgctccactgcaagaatgttgtggcctttcagctcccttgctgcaatatctttcataggctctcccttcatcgttcctgatctcgttggcgttttttctgccattgttccagcagtttaataatggtttcctgcattttggccggtgtatagcttttggggaaatactttcgcaaggtatcactgctcaaggtcactttatccagatcaccctttttttcctctgacatgatggcaagcatcacatcttctgataatttcccgtcctggctgaactttttcattcgctgagcctgagaaagagaaggggtagcctgctcatagtccattgtttccaccagcatttgctgttcgtccggttttaaaaaagagagttcataggctggattaaatgcgattttcttttcatccaccatatccaaaagctctggaatcagctcagtcaaacgaacatatcgcattacctggataccgcttcgttcaccggcttcttttgccacctggtctctggcgctcaacttctgttcaacttgaacagaagtcaggtctgttcttgctccttgatgtttaatggcttccagcttcattttgtaggcaaaagccctttcactggggagcagattttctcgctgcaaattgctgtcaaccataataattgtggcagcatcgtcatccaagtcgcgcacaatgacaggcatggtttcttttccggccaattcgctggctctgcggcgtctgtgaccggctaccagctcataaccgccatcaggcagtggtctggcaatcgcaggaaccaaaacaccatactttttgatgctgtctgcggtttctatcattgcatcatcatccttgaccttgaaggggtgatccttgaacggatgcagttcagataggggaatttcctgaattttttccagttgctcgtcttgccgactttcttcagtagaaaacaggtcatctactgaggccagctctatttttttcgcgctgcttttcaagtttcaatacctccttcgtcagatttttgtagccctcagccactttgccattaggatcatgggcataaatgctttttccttcagcactgatttctttagccctgacagaatgaggaatttctgatgtaaacaccttgatcttactgccataggtttcgcgcaggagagcggagatttctttggcaaaattggttcggctgtctaccatcgtcagcagaatcccatcaatttgcagcttgggattgatttgtctgcgaaccttattgatagtttgcaaaagctgctccaaacctttagcgggaagatattctgcctggacggggattataaccctattagcggcagccagtgcattgactgtaagcatacccagggagggctggcaatcaataaggatatgggagtattgccccttcagcgtgtccagatattgtcgcagaatggtttctcggctcatagcgtttaccagagatacctccataccagatagctggatgtccgcaggcattaggtctacgccctcagggtggtgcaggataccctcgccgggacgaattggttcatccatcaaaatacggcccatagcgtctgacagtgtaaagggcagcttgtcaggttggggattgcccaagctgatggtcaggcttccctgtgggtctccgtcaatcagaaggactttcttcccagactgagccagaccaattccaagattggcacaagtggttgttttgccgacaccacctttttggttggctatggcaataatctgtgtattcatgatttcacctcatttctttctaagtttagatatgaaaaaagtgcctgctctacctttcctgagaaagataaaacaggcacttttactggctcaatacctcttgtaatgagcctctatgtatggtagactatgtccacgataccataaatataattaagtcccgacgggaattgaacttttggctaacgctaaaattcgcgcctttgcaaacagagtgcaaacaatagggggctaaaatcctttgtttttgcttgattttgcttgtacgaggtttacagtgaatgtggagaaatgccttgatataactgcattttctttatctccgttgatagggaatatatgcactgggtccatctcctaagcggaaggccagcggttcgaatccgctcaggaacaccagacacaccgccgaaagccttgattttaggctctttgtcaatagttggggtgggatttgttaaaatcccgccccaattctatgaaaaaggccctttttatgtttagttccaggttttactgattttgggcatgccaaataagcctccgcattaccgacctttttatcctatgatgtacagtgaagtatccgggttcggaaccgtttgaaattccggattccgtagctgctccgttttaatacctttatcttgttgttaaatccttctgtgggaccatttgtcagcccgtatttaaaggcattcaggatttcttttcgccaggccctgtaggtcttagcacaggcctcaaattccttgatcccacagctctgcgcattcgcaatccagtcatcaaattccctctgctgctgacgatacgcttccatctggcagatatcatagaaccactctttcatgcggtgtgccagacgcagatcctcgctatagtgaagcattaaatcacaggcctgtttgttctcatccttcagctttttgtagcgggtcagaatgagtttccggctgcgtttataatacttacgcagagaaaccggcatggagcgctgcagccgtttgcgtacattttcaatcgcccatgtcacctgccggatgaaatgatatttatccacgatgattgtagcatttggaaagaaggtttgtgcaagttcggtgtaggggcgccacatatcgcagacgaagaactttaccttcaggcgttctttcctgggaatgttccgccaataatcagccagatggctctgggtccgatctgggagaatgtcgaggatccgacgctttttcggatcaaccagaatgcactgatatttaccggtagaagcattgcctttgaattcgtcaatggaaagcgcttgtggaagctggtcaggcggaggatagcaaatcgtgtccagaaggcggcagaccgtctggacggaaacaccggtaagctctgcgatctgttttaaggaaaaggtctgccggagcagggagacaatgtaaaatgccagcctgcgggtcctgcggtggtagctggggaggaacgaatagggttccgtgaaccgtttgcggcagtatgggcagaggtagcggcgtttgcgaagaagcaggattacttgttttcccagtaagggaatgtcctggacttcttgtaaacggtaatcatgaatccgttttgttttagccccacagcagggacaagtctgttctaccggttgggactggatgaaaattttaatgaaagagtctgcctgaaccacttttttaatagaaacaccttccaagttaaggaaagccttggtataattagggtacatctataaggggtcacctccataacattaaactttggtcgggataatgcgtttaggaggcttcttatagatgtattttattacaacgaaaagaatgttggaagtgtgcttttcagcacaccccaacattcagtatagaacctgattttactgggttttcggcttttttgtttttttgctgatttgaaaatctgctaataaaattgaaaaactgctaataaattttttcttgctaatacgagttgaacggttttttgcgttttttccaaagaatttttttgctaataaagtagtcctttggagaggtttctggagaggtattttcgtgtgctctgctaatacgattttttctgttagcaaaatttctgctaataaatttaatcggtattagcagactggatagacttaacgatttgcattagcaaatccggattggattgagctaatgcctttaacgcctgttctgcgtcggttgccggcgccggcgcactggcattagtgtccagaaaatcatccatcttttgtgccagcttctctctgtcgctttcaaaggaatgggcgccataccgtcttgtcagcatttctaagtttgcccagccgccggcgtgcttaaccgagttataatctccattggagagcagcagctttgtagaagcgctggtatgtctcagactatggaaaacaacttcttccggattgatttccgggtcattcatttctgtcaggatatctttgaaccgcttgtttaaatgttcggtcataatggggcggccgtttgcctggcagattaccagatcatagtccatatatccctcggggcctaactctgcctttaatttctcctgcatatccttcaatacccggagcgcgtccaggacaatccggggagactccaccattcgtacacttcctttggtctttggctgttttaatacaatgaccgtctttgttcccggaaaaaggttcggaaacttaaaaagaatttccagtttggataacttctccatactttttttgcttacatggtcgatggctctgtcaatgttcagctggcggttttcatagtctatacgatcccattgcagtcctccgatttccccgcctcgtgtagtgcagccaatggcaatcaaaatggcgcagtacatggtatagtaatcataatgctctggtcggcaagtgaatttcaaaacccttaaaacctgttctgatgataaaaccacccgctctttttcttcatgttccggcagagttgcattgataaagggatttttgcttatgtattcccagcgtacagcaagattgaacgcacacctcagcagtttgtgtatatcgtggatggtcgaggccgtgatgtgatccctcatgggttttcccatattcatagcgggttcggcctctgtttctaaataatgataataatcatccacggtcttggttttaactgaacgaagttttttctctcccagataggggcggacataattttctatcagtccgatattgccatcaaagctggaagcgccccatcttttggtgccgtatttttcaatgaactcataaaggaattcattaacagtcctgtcttttccgcctgccggggactggtccgttttctctttcgttgactggtcaagctcaattttagctttaaatgcttttgccgctgcataactaagaccggattcccatagctgctttttaccaacataataaacaacagaataggatttacctctttttacaatagatgccatatactgattctcctttactgtttgctgtcaagccaatcatcaaaggagggtttggaaactctgacatatttgccgacctttaccgttttaaaaagggactgtttgcaaaggttgtatgccatgctccggctgatctgcagaatttctgcaatctcttgaaccgagtaggttcgcttttctgaattggcctgagtatttatgttcatttcttcaactgccatatatacgctcctttctttgcagttgaagcggaatcagcgtagtccatgtgatagttgtcctctatttattatatacgaagtgaacctaccacttttcaactgcaattagcaaatttttaatgtttttttggcatagtattccaggtctattcctgcgccggtggagtccgccgcgtattttcaggcgccgctatgcggcagttaggcagcgggcacgctcatgggtcatcgcatactgtcctcctgcacctgtataactcctggtctatgttatgaaattttcaatgtacggaaaatataagaaacatctttcgtgtttcaaaattgcttcttatgacatataaaaaagacggggcggggtgtttttctgcattttaaagaaaaaattttaaaaaattattgggatctcctgacttatgtttttagcaagcgagaaacaagcacaatatatagttttcatatattgacttaatctatatattgtgttagacttagcctgtaattgatttttgtgcgtatcttgtatagacatacagattttagaatctgtaagcggtcagatatccgcattgcacacgttgtcaagtttgtatgattgtgtcagtagtatcattgtgccctttgggccggtgtattactggctttttttatttcagaggttttatttttcagcgagaatgactttggttcatggactaactatggacatcaggcgtttgcccttagacattcccgctttttttattgcccaaatgccgatatggctttgaggatagatactaatttaagaaaggcggtacagacatgaatgtaagaaggaacaaggcacaaggaagtggagtaaaaagaaccggctattaccctaagaggcagccggagaatcagaaaagctattttcataactgggatcgcaaggtggcggtccggactatcccaattccgcgcagaatacggaaggggcatgaggaatggctgcggaagttggtttgcagaaaaaacggcatacgccgctggttcttgtggaaacagcaggcttgccggaggaggaatggcttgcctaccgccgccgtggtattggcggcagtgatgtggcggcaatcatggggatatccccattcaggacggcccgcgacctatattatgacaaacggggaatcgcaccttttgaggacaatgagggaaattgggttgcgatggagatgggacatcttttagaagatctggtggcgaaaatatttgagagaaaaaccggctatccggtttatcagattaagaagatgttttatcatctggattacccgtttatgctcgctgacgtagattactttgcgacgcttcctgataaatcgacagcacttttagaaatcaaaaccacaaactataatgcccgtgaccactggtggctggacgggaaagaaaccgtcccaatctattatgaaacccagggaagacattatatgtgcgtcatggatattgaccgtattttctactgctgcctttatggcaataatgaaaatgaggtaatcatccgggaaattaagcgggatttggcttacgaggaggaaatgatttttctggaaaaggatttctgggagaaccatgtgcagattcagtcgccgccgccctatacggaagatggagacctgattttggagagcaccaggaggtattcaggaccggcagacgaatcagcgccggacatacagctcagtatggaaactgccacgaaactgatgcgttatctgcagcttcaggaggaaaagaagaacgctgataaacgctctaagcagattgaaaatgatatgcagcggttaaaggcgatgattgcagccgaaatgggagccagttgtacggcggcatatgaaaaagatggaacccgctatctggtcacttacaatcccatccggaaacccggcattgataaggataacctaatgcggttaaagctgcagtatccaaagatttatgaacagtttgtaacggtttccgaatcccgcaggttcaatgtaaaggtatcggcttcagaggcagcctgatacggaaaggaatagaaaatgagttggaaaggtacatatgacggtacgattcattacaaccctgtcgataagtttaccattattattgtaaagacctcggatcagaacgtaccaagggaggcgcggcaggaaagacggtatccggaccatttgatccggtttacagcaataggctatgagcttccacgcaccgatgccgtggaattggaaatggacggggaatgggttgacggcaaacatggctttcagctgcaggtggaacactggaaggagattattccaagaagtgaggaaggtgtaaaaggatatctgtcttccgggctgattaaagggattgggccaaagctggcagataacctggtcatgcgttttggggtgaatgtcctggatattctggaaaagcagccggagcggctgttagagattaagggtatcactgaaaacaggctggaggaaataaaaacttcctatgcggaaagccgaatgctccgggatttaatgacccttttatctccgtttaaagttactcctaagacagcattgaagatttaccaggaattagggccaaccagcgtggaaatacttaaaaaaagtccttacgagctgtgcgggatttctggtttcggttttttacgtgttgatgcgattgtaaggaagactgacaaccgcccccatgaccctatgcggatgaaaggggcgctcctgtgcgccttaaataatgccagaagtgaaaaggggcatttatttcttgaaaaggaagtattgctgaaagagacgttaaggctgctgaataaaacaattcctctgccggatcagcgtctttctatgcaggaagtggcagacgtccttcaggatctggttctatgtggaactgttgttttggtaaaagccaaaatgtgtaaacaggaacgggatttaaagacaggcaggctgatacagaagattgtcatggaggatcttatttacagacccaatgtatttgagcaggaggacgaaacagcgcggcagattgcgctgcgtctgaccgagcggcagccacaagaacagattagttcactactggaaaagctaaaggtgcagtttaaccttatgctttcagaaaaacaggaaatgggggtgaaacaggcatttcaaagcagtctctccattattaccggtccgcccggcacaggtaaaaccacggtcattaagatgataattgagctgttccgggtactgtatcccaaaagcgggatcatgctcatggcgcctaccggacgtgcaagccggcgtatggcggaaagcacaggatttgaagaagccagaaccatgcacaacgctttgcggctgtccagtgaggaggcggaaagccatcattccaaggaggaggatctgctctctgccggtttgattatcgtcgatgaattttctcttgtggatatgtggctggcaaaacagttttttacgcggctggacaaagggacaaaaattgttctggtcggtgatgtggaccagcttcccagcgttggtgcaggcaatgtgctgcgggaaatgatacagtgcggccttgtgccggtaacggtattggacgagatattccgtcaggcaaaggacagctttattccctataacggaaagctgattaaccagggtgatacaaacctgttttatgggaatgattttgtatttattccgtccgcaggccagacagaaacatcggaaaaactggtggagatgtattgccaggagattgcggaaaatggtgtggaacgggtacagatattatcacctttccgtgcagagggggagacttccgtgaaccggctgaatgcggtcatccgtgaaattgtcaatccattctgttctacggaggatacttagtttagcacatatggatttgcggcgaaagagcagaagtgtgccaatgttgcgcctgttcagtgcctattttattccatttcggatagtgatgataaattattgagggtaaatagtaatgttataaccgaaaaatcaacatggatatagattataccggaatagtatacaaaaaataaaatttatattacataataaaaatcgacattggtgttgaaaaatatgaaataatatattgacataaggtggatatatatggtatatttcgatgtggagggaagaaaaatatggataatattatattggcaaacttgtctgccgagaatttcagttcatttgcggacgaaataaaatttaccacagtagtcgatagcggtaagaaggaatatgctgaaaatacttttgaatgtggagataccacttttaacaaagtctctttcttatatggtgcgaacggatcgggtaaaacatatttctgtaaaatattaagagaaattcaacgtatgctaaattggtctcccttaactgctatgaataattctcacttactatctctaccggagtttaaaggaattgataaggagatttctacatttgcttttgacatagaatataaaggtaaaccggtaaaattttccattgatatccgcttagaggagtttaactatcattacgaatttacaattctaggaaaaaaagttgagcatgaactgttgacaaaaaaatatcagagaactgaaaaattgttagaaaggacttctccttcgtataaggatattactctgcgttccaaattaaaagaatttgaagcagcaaaacaaacagtgaaggaagaagccttatgtctaccagtagcagcattgcttaataatcagctggctcaaacgatagttgatgctattaaaagtatacaggtagtgagtatgacagcagcgaggcttaaaccggctgatacaaaagaatcattttctgaggaaaggctggaaaaatatgtagatatactaaggaaagctgatccaactttgcgaaaaatgaaagtctcatatgaggaaaaggagatagctcatcaaaaaattgagtccgatgattttgaaaatagggagattattgctactaaaacgaccgttggcgtcgaaacagagcatgctatgtttgaaaacggcacggaaacgggtagtacgtcaattatgttttttgcagatgaatcattggggacggttaaactctttactgcgttgccatatctatacgatactctggaaaaaggcggcgttttaatagtagatgagttagaaaatgggcttcatctttcacttgcgaaggagataattaatctatttacaaacagtgagagtaatccgcataatgcacaacttatttgcacatcgcatcaaccgttgttgatagatggaaatgttcgacgtgatcaggtttgggtaacgagtaaagatgtttttggaaaaagtacactgcatagaatgagtgagttaaagacttcacgagccaaagtgaatttggcaaatagaatactagaaggagcattcggctgcaatccggagcgcttctttgaaaataacacagtttaaagaaaaacaaaacaccgagctgcaatctcggtgtcctgtagggtgacaaaagtacgagcaaggtactttgccgtatcaaaacaagttcagtgtaccataatttatagactcgtgcaatatgaaatttgtgcctggaaaggggaaaatacaggaacttttctgaaaatgtgatgacatagatgaaactatatagttatgcatatttaaggaaggtgatagatatttttgtttcggaatttattaaagcagggattaaagggcatcggaattttgattttgtagatgttaatttagatgatgatactcggctatttattgatccctgtatgattgaaggggcagaagatccctggagtgttaatgcagaaaaagtaatgcgtacatattttgactgtatatttgacggattttataatggtaatgtacgtaggacttcgttgctttcgcatgcggggaacagaatgcaacaaaattgggttatggtaatggtgacaatggtaaggggaagaccgaggatggcctttgggacagtttaaaaggtttggcaacacttatacatgatattccaactattaattgtgctcaagatattcctgttttagtagagggattcgcagaagatggtatgtctgatttactaaccaatattttgcatgaacagttaaaccattttacccaggcacagatgttaaaatggggatgtgctccacaaggagaaaaatcaatctggacatttaatgcggaaaagcatagttggattgaggttatgcgcccatgttggttacatcgaggaaaagaaatattgctggtgccaaagtggattgtacgccgcaattacttatttaaggcacatcaatatttgtacagcataattgttgaacgtatgcgtgaggctaatggatgggaagatttgaagaagattgacgtttggaacaatctccctagaaatagtgagcattgggaatatgaaacagtgattgcgtactcgaagcagtacccagaggcactatctgaatatcatgaccgtatgccacacttctacaaaagagcaagaggctgtatgacagatgaggatttggactgtgcagtgtatggattttctataacggacgctgcttagaggggagagaggattatgaataataaaagatctagtgcaaaattggcatcacaggctgctaaaacattgactaatccgaaagcatctaatatacaaaaatcacttgctgcgggtgttttatcacaaagagctcctaaaaaacagacaggttcccagatggaagatatagcttccagagttttacaaagcgacaaatacgcagagaaaactaagagttttgcagctagcctgctttcacaatcgaataaagagcgttaagaatacaaggagctgtagagaatttatggaatctacagctccctgtttttcacgagacctttcatgaatgttaatatcaaaaatgagacaggactatccaatttcttaatttgtttgtgtttctgttggaaatattgtaaaatataagtaagtattccgcttgaaaatgaggatatgattttctgctataaaattaggggttgactaagcgcagaattctgcatataatattaggtttataggaggtatgctatggcaaaaaagaaattttatgccgttcgcaaaggaacaacaataggggtatttgaaagctggttagaatgtcaggccgcaacgactggatatagcaatgcagaatttaaaagcttttccactttagaagaagcagagtgctatattaaaaatgaatcttcagttgttaataatgctaatgctgagagttttgtgttaaatccaacaaaagttattgcatatgtagatggaagctatgatgataagttgaaaaaatatgcatttggctgtgtaattttgactccatctggggaaactataaaagaacatggaaatggagaaaatccagcatctttagcaatacggaatgttgccggtgaaatgctgggtgcaatgttcgccgttaaatgggctataactaatggatattctgaaatagaactgcgatatgactatgagggaattgaaaaatgggtaactggtgactggaaagcgaaaaatgaattggcacagaaatatgccacatcaatgaatgagtggaaacaaaccattcaaatttctttccttaaagtaacggcccattccaacaataagtataatgatatggcggacgagttagccaagacggctcttacagagggaagagggattcctaaaattaaaaaaggtgattactggtttactgctgagggaatcaatcgtaacgatctgatatctgttatggaacttgttaaagaagagtatgggcctgatatttcagagaatcagcatccaattgcacatggtatttcctacagcctaaatctgggtaaaaaggataagattacaattaaccactatgataccaataaattaatggttcaagggaaaccacagatgctgttttcgtgtatcatcacctatataacagaattggttgatatagatgaaatccctaaaattttcaatcaaacctttaacttgaatatagataaaagcaatatccaaaatgagtttcagtattatttaccaaactcttataataagtttaatgaaaaaatgacaagggtattgcaccaggcagtctataatctgaatataaatggagatatgtttgatggaacctttttggcacagcctgcattacgagtattggaaggccatttgaaaaaaatagttattgaccgccaaattgcaccagataataattacataaaatacaacggctttgatttttttgaatcgaacggttcaaaatatcagctaaaatcggagagtgtggggaaagcatccccggcagagattagttatctggggcgttgctatacattttatcataacaacagacatatattggagcattgggatgacccaacggctccgctggatacaacaaagacacttgattgtgcacaggcacgcgatttaattaaaagaacttttgaagttattgacgatttttacactatttaattgtcagtatttataaaacggaggaaggaggttcactggcatgaaggattataatatcatttggttagagcaacaaaatactttgttaattttaatttgtacttgcgaatctccattcacctatttaccggagattaagtatgagttagataaaataggcttttctggaacaattatttttgacgagcttttacacagtggaaataacgaggaacggtttataagttgtacgtttgaaggtggcaacttccaaaatgactcttttaagtttactcgggtaccaaaacaggcggctttgcgggaatatatgagcctttacttaaaaaacgatagtgaatatctccattcatcggggctgacttcctctcaaatcaaattgattgagaaagaatgtgttatctaagagcagatttttaatccgataatgaatccgatattgaaagcgattctgtctattgataaataagttccccttagagtaccagctttaaggggacttgccattgctttataccatcaataaacaaattttctaaaatattcaaagtgtcttttgacgcatataccctcaacatggggctaagtgcgtcaatcgccgccctacgctggcggtaataggttctgaagcagatgtcatggatatgaggacgaagtttctcgataatttcttccacattccgaagctgctgtggcgagagatagataaaatacagtaaccagtaatatgcctccctcgcttttatgcttattcctcggcgattagatggcgcgattcaagggcaagattaccctttcagtattaccaagaccgaaaaaaacttatgattttatttcgtctacggctttagataataagcctctatccaaagccgttttatgttacaccgcatttttaattgctcacccctatagcaataataaatctttaaagtttgaatatacttgatcaataaacttaggggattcataaaagcccgctatttctgtataagaggcttctaataattctggagaatattttttcccattaactcttgtaaatgggccatcactttcaacaagaactctatttggaggtaactttagcagtttatctttcaagcctttatttcgcaccatgttggtatttactgagaaatagcaatctaaatcaattaattcttccaattgagatgttgtacctaaaaaccagtgtataatacattttttagggctgtatttgcgtataatttctattgcctcattttccgatttgcgcaaatgaatagtcatcaccttattttgccttgagcactcatcgacaatacgttcaaaaaaatcaatctgttttatcttgggaatgtactgctcggaggaaaaatccattccgatttcacctacataatttgttgtatttattaaagacataaaatcagataaatctctagtagatagagagctgtcttgtggatggaagcccattgcaaatttcaaataggttgtttccttatatatttttttgcacgaaacaaatactcctggactgtttgtaacgcacaaagtatattgctttaattcatttatagaatcatataattctttatggttcttgtaataatctaaatgataatgtgtgtctataagttttcccatcataaccccatatattctttcaacgcagaatctgcagaaaataattcaatcaaatcatccattgtttttttataaacgcgaacaaaattttcaacttcatcttttgttaatttcccagtacattttataagtcgcctaatttcatcatcacttatattttgatatctgtatatgctggatatgacagctgaaagatcatttaccttatcactttctgaataatgatgtaaaaagctaagagaaatactttcatatgagtatttttcattttgtgtatttacatctatcaacgaactttttctgatgaggcagggataacaatagccacagttaataggatattcccgttctccggttttgttccatcgtgaaacacatgggtgagaacatgatatggtatctgcaaaaccgcgattaaaagcagcagtatttctcaccatattgacaatttctcgtttggtactaaatgcaaagaaatttataataggattatgtattcccacaatattaagaatctccaaaaagcattttaaaaaatagggatgggttgttcgcgtactacatgttcctttgcggctgtcagtaagagggatatttagtccaataaaaccattttcaggaatatagacaggagtatcttctcccattataccagcaatagttaatgccccacacaagaaaagcagagatcttcctcttgatgtgttttcagttccactaagttttccggcttcattctggggtgctcttgaattagctgtaaagcttataaacctggcggtctgctctggatattcttcacaaaacatagatgttaaattttcctgtttcgcgcgtaatttaggatattcattatgtccgaataaacagggagattttccttcttccagtaatgaaaaggctccacaaaaagagtctaaaccgccagaaaacaagcatacagcgttgcaggctgtaatgtctaactttatacggctaggatgggttctcaaactatataaaagctccgtttttcgaaaagatatattccatgaatcaccagttaaaaaactcaaagtattattccacaagccagctactgaattccacttctcaaattcaatgacgggtatagatacatcgagctgacgtgtccaacaatctttaaaatgcgagcgagccactcttttatcaattgcgaaaactgaaattgcaataataaataagtcttcataagttgaaggaatagatagtgctcccaacctaagccacgtatcggctaaattcgtaaagatagtgctatacccctttcggttaagcgaaaagatataggaatctgaataattagtatctggagtttcggaattgtctttgtttatccatattttcatatgctaatcctccgtatagagttcttcaaacactgaataggcatcaactaaagctttatcaacatattcgctgccggccaagttagtaaaatcaatacttttaatatcgctaaagctaagcccctcatataagttgcttttaatataatcctgcatctcctccattatacggtgagcatcggccggtgttcggtctttcccaattttttcagcataccggaaatcaaagttaacgattacataatcaaccagcatttctttgagcagagtttcttgaggaatatcaccaagctgttccaaatctgtaatttgtaaattttctaaagcttttgatagagcatctgccgccaaagcgtcctctatggttgcgccattatgagtatattcatgaagcagttcgtcccagatctccgctgaaggcttgccaattaaatcagatctgttaatctgatttaacgcaaattctgtcccatgattggcaacatctcttgccaaacttaaaatacctgtagcagcatttgtgaaagtgctgccagaggtagtatccgccttcatagccgaagcaaatttacttcctgctttagcaatagaatctgagtcgccatttcgaagcatttgtgtaacagcacgttttgcttgcgtccattgtatacgagtcggagcgatataaccttttgaagttcccattttacgccttctttcctgttatcttgtcgtataattttgcactaagaatactgcctttcatcttccctaaaacaggtgctactttttcactgcattctttatacatggaggccaaatatatggaatctccaggttttatggtttgtttagatttaactatagattctaatattttctcttggtatggcacaaaacctataaataattccttgatgatgaaatagtcaagctgtccactttctatgcgtggaaataatacagaaaatatattatctatatcaacaggagttaatgccttcatattattgattatgctatttattgttccgcgtgaagctaggccgagttcttctaaagtacggcgggcctggctactgaaactttgcgaatctataatattctttgcaagattttcacgtgtcaaataaaaatatctatctaatcgttggctgtataagtctttaggttcacactctatccactttctgatggttggcatacaccatttggtatattcaacctcattttttccatctgatatagcttcatacatggctttatatttgtcattacataatgtgaaatctttattccactcgttaagctgattaaacagatcagaatctaatttttgcaataccaacagctttgcaagaatacgcatgtctatatcattgttgtaatacatctgggcaagtgatttttttgtgacaaaggtattgagaaatcttttggcctgccttggatttccttttaaagtataggatacaatgtcacggatactgtcaattatattagcatcttccataaacttttcttctgatggaacatattctaattgtaactctgagattaatactttcatttctggtaatgtaatgcgggtatccctaactatgtatttctcatcatatatcttttctatgagagattgaaaatcatcttttgacaaatagtattgtgctacaagcaataataaataattctcaatgtcttttgatgataattcaggaatatagattggcaactgtataatcttttcaatatactctgttgataattctacgtctgacccctcaatatggggatatttatttttaatggcgtactgtatgacattatcatcggcggcgattataaaagtagtacgtttaacagataaaaaaagtttaatagcttctaatatctcaataatgcgttcaggtgtgcatctatcaagatcatctacaattattactacattgcttacatccgaattcattagcatctgttcaaaatcattgctaaagtttctgatattatctaccattgtttcattgcttaaatatgaatccttttcgtcctgcaccctgtccgctgcagatttaatcacctttgcagcgtcaccaacattttgggggatacctagtgccatgggtaatggattgccagttgcaatacttgtaacaacagaagccccatagatattgctgatgttgctagtttgaaaaggtcaactcgttggaacaatcttttaatatcactttccacttttttaaaaggttttttatcataaaattcttttaaaagcgtttccatcaatgaagtctttgcatcttcatatccttcgaacatccaagcattaacattaacacaaaatactttttcctctccgtttaactgttgttcaattaaatttaatagtgtagatttgcctgcccccaaagtccaaaaacgcctatagtgagcgggttattattttcgtttttagcgatatcagagattagttgagcataaggaccatagaataaaatatcaatatcagacgcattatccagccacatagatttttctccctgtttttaatatttatatttaattttaaataatttagggtgagtattcattcatatggtgtaaaaatacgctcaatagtactattttaagtatactcacccctcaattatatcagaatttataaaatatgtctttctaaattcatatttattggcaaatccttattaaaaaaggtgttccagaatgtttaagctgtctttcgaagtatatcccacaaaatagagctgagagcgtcaatcgcctccctgcgccgacggtaataggttctaaagctgatgtcccggatatggggacgcagtttctcaatgatttcctccacatttcgaagctgctgtggggagagataggtgtaatatagcagccagtaataagcctccccgtttttatgcttattcctcagcaattcgattgccgaatccaacagtttcagcatcttatggctttgttcgatacatttagcatgacgttcaatgccgcttccggacaaatcagcgcctgccaggtataccgaatccagaaattcctcaatggagctgccaaactcgatctcaaaccgattcctgacctgctgaaccgacagttccaggctccataccacatcacggtattttttaagcagtttccaggtatcgtggtacaacggatcatccatcacatctgtctctttattctttcccataatcaaattctcctttattattttcgcaaggcgagagtgtaagttcaaaagtgcgtaccggtctgtccccgcagaggatagccagtccaaaccggcattcatattccctacgcgcgcggatataatactcacccgtgcagtcgtcggataaaggatataacttatatttggaattgggacattcaaagcacgaaatcccttgtgcagacaggattttcgccatcttctgaatgacaatctctatgtgatgttttgaaacgctattaaggtcgtctgaaacacaaatctcatgttccacagcgttatcttctgaagaatcttctttttcgggaagttctagtttgatgttaagaaccattgcaacctcctctttgtcaatcattacatcggatatctggaacatggtggataaatagctttgcaggtaaatcacgctgccatggcgcccggggaatgtcatgagcgatatgtattcccggtctgacagtctttttaaaagtcttccgactgtggccttagataagccccaccgttctgccaattgattgtaggaaacaagcggatttccggttccattccgcatataaaccaccgggccgacttccgagccttcaacctgctcatcgttataaacagtagaaagccataaatccaggataatatccatctccgagcagcggctggtactgataagctccgcagccgtggaaaccggcatgaagaaaaaaccactgtctttctggcaggggcagttgtaatccaggacagtattgtgtttcttccagtcacggattttatacttaatgatcttcccgcgcccaagtgacaggaatgatataaggtgcatatcctgcaggttttctaaaatatcaagtgcctgacactgaaaacgggtacggaaccactcggataattcctttacggtacagatccattctcccggatagaccgtataagagatgccgtctatgcggcggtacgaggtacggaaatttgcatagctgcacagtaccgtaaaataaaaaaggccggagcctccgtttaaacggaaacttcggtcattcatcagactatgtacgaactgccggtaaatccggcagcgtgggtagtcaacgatttgtttgatctgtaattgatattcggacataaagcctccttgcaaccattagttttttgcattataataaaagagtgaatttgaacctaaagctttcaatttcactctttttgaaaaaatgctaataatctgctaataacactacgaaatacgattagcttttctgtggaaccaggaactcctacggagaatatggatgttcaatttgcttgattttattggacttagagaactcacatggaatacgctgtatccctgtggaaacgccaattctaactcctaagcggaaggccagcggttcgaatccgctcaggaacactgaatacaatgccgaaaaccttgatgtgagaggttttcggttttttaatttaacaggaaagttctcctgttaaattaaaaccgctccatgaagaagtgcactgcagaggcaggaaaactatttttaagtttgacactgtgattccgtcatgatagtattaaaaccagcaatataaacggatggttttaagatgacgaacgtagttctcgatttatatagtattactatatgcctgatactgtttatttatctggcatccggtaatcggaaacataataaacttaacaggtatttcaggaatatgtgtgcagctaatataatcatgctgctgggggatatgacaaactggctgtgtgaagggacttcgaattcctggttcccggttcttctacggtcagggacggctgtttattatctcagtgcggttcctctggtttacttttttgcatgttacattacagaatatatgtctgtgcggacgaaagtcagtttgcttttcaaaaaaacagttctggcgctgggagttttctacagtatcggggtgattttatcactccgaaggggactgtttttttctatctcggaagaaaatatttatcagcggggcgaatggtactggctttcacaggcgataccgcttttagtatatctgcttgcctgtctatttatttttatttacaggagacagttttcaaaacgtgagaaatggattttttcaagctatatcctctttcctgtaatagctgaaggcatacagatatgcttttatggagttgccttgctaaacacggcgataacggtttcattactcgttatttttataaatatccagcttcagagagagttgctgatggagcaccaagaaacggagctggcaaaaatgagaattaatataatgctgagccagatacagccgcattttctttacaacacactgacaacgatacggcagctttgcgatcttgatcctatgcaggcaaaacaggctatccgcgatttcgcctggtttctccggtcaaatatggattcgctgactaataaggagcggataccctttgagcaggaactgcagcataccaaaagctatgtgaatttggaactgcagaggttcagagagaggctgaaggtgaactatgatattcagtcgtatgattttaccatccctccgctgacccttcagccgattgtggagaatgctatcagacatggcgttatgaaacgggaggaaggtggaacaataacaatcagaacagaggaggatgagattgaataccggatttttgtatatgatgatggaattggttttcaggtgaaagagagcggagaaggaataaagacggacagaccggaagaaaagtgccacattggtacagaaaatgtgagaaaacgtcttcaggcaatgtgcaatggcacattggagatttacagcagaccgggtgaggggacgacagccctgatccggattccaaggagggatagaaatgacaatcattgcggttgacgatgagccgctggcattgcttgatttgaaagagacattactggaggctgcacctgattgcagaccgttttgctttacgtcgccgaaaaaggctgtggagtatgccgaaaagaatagggcggaagtcgctcttcttgatatagagatggggccatgggacggtttccgcctggcgctggaattaaaagccctgcagccggatatgagaattgtttttgttaccagtcacgaaaagtatgcaattgatgctttcaggattcatgcaaccggttatcttttaaagccggtggcaagcgaggcgattaaaagagaactgacatttatctatggggagaacctgcaggataggggaaagagggtccgcattcagacctttggcggttttgatgtgtttgtagacggagagcgtctgaattttaagcgggcaaaggcaaaagaacttctggcctgcctggtggatcgaaagggagtcagtatcacaacaagggaagcatgtgccattctctgggaggataagccttataattcggcccagaaaagttattatcagacaatagcggccgaattaaaggcggctctccggggagttggagcagacaatattttagtaaagacaagaaacagtcttgcgatacggccagagcatttagactgtgacagttatcgctttatggagggagatccgagttcaataagcagctatcggcagaattatatgtcttgctacagttgggcagagttcagcatagggcagttggagcgccgctaactgcccggttttgccgcctctttcagcttccttttaaaatccatgtagcgctctttactgatcggaagttcgcagccgttctcaagcactgcattgtagcgggagatacgatcaatataaagacagttaaccagataacttttgtggatccggaagaagtattccggcattttttgttcataggcggataaaaggcccggagcctgaaagctgccggcttttgtatagaagatacagtggcgtccatctgcttttagatataaaatttcggatggaaacaaacagcgatgatttttttcacaatcgcggatcgtgagtttttggagattccgttctgccgatgccagcttttccatgaaatcaaaaaagtcggactcttccgtgaaagtactttccgtttgaagaaaaggctcgagaggaatatcctgtgaggcagaaccgtgaacatgcgcaagtctcaggtttccttttatcatgcgccatataaaggtaacccggatatgcagtctaatccgggaaaggtcttttaatgtagctgtcactttatagcggccatagacaacccatacatttctatcatggaacagcaaatggtattcctcatctgacaggagtacaggttcttcctggtattccttctttgtaacccgtataaattcatcaattccttcgcaccactgaaaatcattggagccaatccacataaaatcttcggacataggcgcgattgtcaattcagttttacgtccgtaaaagctttgaattacctgcctggtttgctcaataatttcattttctctatatgaattttttctcatcgcatctctctttatattacttttttcgtttttttacttattataacaacaagatagaacgtagacaaggaatattaaatcataaaaaaacaaatattacccattcattacaatatatatgctgtttatttgtgttgctgttttgttgtactgtaaattctataattataagcagaatacaaatttttcctgtgtaacggaaggggaatttttatggagacggataaaatgatcgctttgactggagtcgaaggaggaagccagttccgtgattccaagacgaggatcccggaggctgcccacagtctgattgaaagaacccgtttggtagaggaaatttccgcatcaggagctgaggtgtgtatatttaatgccggagccggttttggaaaaacgattctgatggcggagctggccagaaaatatgacgggcagtatatctggtatcagattgacggtacggacaatgatcctatctgttttttgcaagggttgatgcatggaatatccaagcttccaaccccttttcatctgccggttgggcggctgagagagccggaggagcttcacagtgcggttctggcgctggctgagtggctgtcacggacgctgacagccactttttattttatgtttgacgatcttcacgaaattgaggatgagagtgttttcacgattatcaggcttttaattgacaatacgccggaggatatcaggttctgctttacagtgaagggaggattccctaaatttctggcctcttacctactgaagagcaaagctattcttgtagaagcggagaaactgcgattcacgaaagaagagacgggacagcttcttcactgcctgacggggcagacggcagatgcgccggtgattgagaatattgcggagtacatagaaggctggccggccggcgtcatgtttgccggtctggcaataaagtccgacagtacattcaagtccgacaacagttccggtgatatcgcttctgtgatgatacatactaaaatatacgactatattcattatgaaatattcagaaagcttccgtttgacatgcagcgctttcttatggatacggcaccgctgcaatcgctcagtgtgcctctgtgcaatcatgtaaccggccgcattgactccggcagcattctggattatctggtaggagaaaatttatttatttataaatttaaaggctggaaaaagtggtaccggtatcattctatttttcaggactttttgctcagcaggctggacggggaaagaaaaaaagagattctaaataaagctgcttattattttttaaagatcggggaatcggaacaagcggttctttatgggatgaaggccatggcatataccgtggtggaaattgccgtggaaaaagaggcggtcaagctggcgcaggagggacgccaggccacggtaagccagtggatacatttcctggagccggtatcggagcgtctggggagccggtgcctgtacgaaataagccggtattatcttctgtcagaagaggaagagaaagcggtagaatacctgcgccttgcggctgagaaggcatgttcggacggagagaaagaattgtacgggcaatatggaatagaactgttaggatatctgaaccgtctttacggactccgccgtgcaaaggaacaggcattacaaatggctgagcatatgaaaaacggtcaggcagatcataactacaagctattgatacccttactggaataccgtcttcagctgggcgagtgggagccgatggaggaggtaacaaaagaggtctcggaaaataaaagaagaattcacacgactatggtgagaaacgcggtaatatggctcctttcgcttcgggacaaatgtgaaaactgggaaaataccctggaagaagcgcggatgtaccggagactgtcacctgtgtttgcagaatacggtttttacaggtacggctggttcctttatctaaaaaatgatcggaattaccggctggtgatggaggaggggctctctatcggaggaggaagtatttttgcccaatggatgaggctgctgcttattctccaggaatacagagagaagaaaagtgcggggccgggaccggcggaggaattgaggcagattgaagagcagatggatcgccagggaatcgactacccggcatttttagagagagatgccgagcttctatccgggatcatcatgggacaggaaccgtatggtgaacaggataaagccggccggaagcagggaacaggagaaacggtttccggtgaaaaagcaaaattagaggttttttgtttaggaagttttaccgtgaaggctggtggagtcacactggtctggagaacgagaaaatccagggaattgtttgcctgcctttttgtccagaatgggaaggggcttgacaagacaagcctgatcttccggctgtggcccgacgcatcggagaagaatggttctacgctttttaatacaacagtgtcttatctgagaaaaacactggcccaggcagatgctgcggatgcgctgctggtaaaggacaggcaatattcccttgatatgaagcgtatatggtcggattacggccgtctggaggaactggcgcttctggtgagaagaggagagttcgaccggattgaaaatccgcgggagctggcggaactttacaacggggaatacctggaaagtgaggactaccgctggatggtcggacggaaggaatatgtcggccaaatgtttatgcaggcggcggaaaatacggcaaagtgggagaaaagccggaaacattatgatacggcgattgcaatcctccagaagatgctggaggtgaactcctactcggccggcgcccttagactgcttctgaagtgcaggatggagtcgggcgatctgaacggtgcgaagcgccaatatgagaaaatgcgtcaaatctggaaacgggaatgggatcaggagctgggtcacgattttacggacttcataacgatgagtgaagaggaggagctatgacggaggagtactatgggaggatgtttgatatcttaaactttgcagccgggcgcctttatggagaaaaagacacggagaaggaaaagccggcaaaatgggaagaaaagtggcttctgtggaagcgcgagggtgagcgccttcgcgaagcgggaattgccgaaccttttgaatatctggcagaattgtcggggcttgatgattttgaacgtttctgcctggctgcgcttaccgctgccgaactggatccccagtcagcccgaaggaaggaacgctttcacgcaagggaaggagggggcatctgtatttctgagctgatgtctctgtatgagggaaagtacagcttttccgaagagaggtaccgctcgtttctgggtgacggccgtatcgcctcctggttcctggaggaaggggattcgtcaaatggaccttctctgtttgaagggattaggctggacggaaggatccgtaactttatcctggccgggcagtgggaggatccggtaacggaagagtttggcgtctttttctatccgggagaagaacaggagggagaagagatgattccgggatccttcgggagaagcagtactgccgttggacacaggcacttttaaataataaaggcggacggatgtgcattttaaccggccctgacggaatcgggaaaagaacacaggtgcgcaggtttgcggaagagacgggaacggccgtcttttttgccgatggagcggctcttatgccgcttgcggacagggagcctgcgcagaccatgcgccatctgctgcgggaatgcagaatcaaacagtctgtcctctgtatcaggcgggtaaaggagaaggactgggacggggagagggggaatttcctgaaccgtctgatcagcagagggctcttgtgtctgcctgccgtcatcttactgttggatgagccgggaagttttcgtgagataacggccgacgcggtgcaggagagtattcccatgccttctctggcggaatctgccgttttatggagagagataggaaggcattaccccgtgtccgcgaatactgttttggaagagtttgccggaaccatgcagatgactccgggacagataaaaggcgtctttatgagagcgaaaaattttatggagcgtgacggtctggagcagatagacggacggcttctgaaagaggcctgcgccggacaggcacagacacggctgacggataaggccgtcagggtaaaagtcagatataatttttctgatttaattcttccggcagacagacgccgacagcttatggaggcgtgcagtcaggtaaaacaccggtatcagatatatgaaaaatggggattttcacagaagatggcttatgggacaggaacctccatcgtattttcagggcctcccggcacaggcaagacaatggcggcacaggttatggcgggcgaactggggctggagctttttaaggtggatttatcatcagtggtcagcaaatacatcggagagacggaaaagaatctaaatcagatttttgacgaaggaagaagaagccaggcggtactctttttcgatgaggctgatgtcctgttctcaaaacggacggaggtaaaggattcccatgataaatacagcaatatggaggcggcttttatgctgcagaagatggaagaatatacgggagtcgtaattctggcaaccaattacctacagaatatagatgaggcgtttaaacggcgtctaaccgctattattgaatttccgtttcccgacatgctccaccgccgtcttctctggcggtcggtcatcccccaggagcttccgctgggagatgacgtggatctggatttcctggcgtccggttttgagatgagcggaagccagatcaagaacagtattctgggcgctgcatttttggcggcgggagaggattcggaaactgtttctatgggccatattctcaggtcagtcagaaaagagctggccaagagcggaaaaaagctgacacgggaggattttggagaatactgcgtgcttcttgatgaaatggggaacggctatgaagtatgagcatatagagacggattatgaaaaggaacggaaacgttcggatcacagactgcgccaggcaccaaaggaggaacccgtccgccgggatacggacaagaaagaaggaaagcagcggggattagaggggtatgaaccctcggagcaggagagccgggaggagactgtgcccagggagcagcttctggtcagagggaaagatcagaggctcagtgcgggccataataaggataataggctgactatggttttttccagagataagaacgccggaacggtgaaggatcaggagtcaatcgggaaagagggaagctccgctatgaatcaggataaaaaatacctgcgttcaagaacacacaatccgaaaaagagcgctgtgatactggaggatcgggatgagagacgcaaacagttcctgatggaacggctgatgcgctctatagatgcgcctgaggacatgctcctgggtgaatccttttccttcattagcagcaggaaagaaaaggcccggatacggcgtctggaggaggaagcaaggactgcttccctggaccgggagctggtggagaaaaatagaaaagaagcgtctttcctctatcaggatctgatatacaaagagcaggaacgccgtgactttatgaaaaagctgatctcacaggtcacaccggaaaacgttaaaaaaaagaatggcggatggattcccgctctggccctggcgtttttgtctgcgcttgtggatgacgggggagatgaaggggaaaagggagcagaaacccagccgggagatggagtggaaaaaaacccggccggcgaaggtgaaaaagacagcaaagcggacataagggacaagagcagccagggggagaaaaatcctgaaaatgaggacaaaaagggacggcaaaatcctgacaacaagaaggctgaaccggatttgcaataaaaaaatcatatttatgataaaaaatgaaaaaaatatggaaaaaatgagaaaaaaatggaaaagtttggagtttgttaagcggttgttaagtcgtaatctgtagaattatattgaaaacaaatgttgagtataaacaaaatattttacacagaaaggaggcatccagtttcataaattaattgggaactgggacaatatggctgaatatttatcaccaggcgtctatgtcgaagagttcgagtccggcggaaaaccaatggaaggtgtcggaaccagcacggccggttttattggacttgcagaaaaaggagcggtagagggtgtgcctcagctggtaactaactttgccgattttaagagaaaatacggcggatacttatcagaaaatgagtttggcgaataccgttttctcgcctatgcggtagagcatttctttattaacggaggtaccagagcctttatctcccgcgttgcgtcaaaggatgcaaaatgtgcggagggaaaggtgccggaagcagacgccgtattatcggttattgcaaagaacccgggggcgtggggcaataacatcagcgttgtcatcactccgtcaagcaaggcaaaaacacagatccttgatattctggacacagccggaggcaagcgatatcatgtgaagaattccggcggctttaatgtgggcgatattgtcatgtattctgatcagacaacggccgtttataaccgagtaatcaagagccaggataatattattgaatttgagaatgaatttgatgagagtgtaattgacaagaatctgcttccgtccaaagtgatcacgacatgcgagtttaacctggaggtaaaagcagatgaccaggtagaactttatgagaatgtatcatttaacatcgaagcttccaactatgtggataagaagacagccaagtcggatttggtggaggtacactgtctggcgccgtcaggctccgatattgtatccccgttccttgccatctccgaactggatgaggataaggcgcttgtatccgtgaatctggcaggcggatctaacggaagcgtatcctccttaagcgcggccgactttatcggaacagacggcggagccgggaaacgtaccggaatccagtcattcttagacaatgacaatgtctctatcatggctgtgccgggcgtaacggatccgaatgtacagctgatgctggtggctcactgtgagaatctcggaagccggtttgccgtacttgacatgccaagggaggcaaagaagctggacgacattatggctcacagggatatcttcgatactaattatgcggcattataccatccgtggcttcaggtattcgatcccctggacaagaagaatattgcgattccgccttcaggctccatgatcggaatctatgccagaagcgacagtaccagaggcgtacataaggctccggccaacgagccggtacgggcctgtgtgggactcgactgccagtttaataagggcgagcaggatattctgaaccccaagggcgttaacttaatccgttccttcccgggcatgggaatccgtgtatggggagccagaacggcaaccagcaacccaagctggaaatatattaatgtgcgcagactgttcatctttattgaagagtctattaaggccaacaccaactgggctgtattcgagccaaatgatgaagtactgtgggtacgtgtcagaagaacaattgaagtattcctgacgggaatgtggcgtgacggttctctggcgggaagctctcctgaggaggcattctttgtaaacatcgggcacgatacaatgagtcaggacgatattgacaacggacggctgatttgtgtgattggtgtagcacctgtgaaacctgctgaatttgttatattcaggatttcccagaaaacaagtgatgctgaataatgcaggaaggagaattagacgatggctacgtatccatatggaagatttagatataaagtggaaattgacggcctggaagccggcggcttttcagaggttaccggatttgacgcttcaattgatgtgatggaatacagagaaggtgatatggttcagaccccgatgaagattccgggactgaagaaatacggcaatattaccctgaaaaaaggtctggcggattccagggctctctatgactggatgatcgcaggcgtgaacggcgatgtggagagaaagacaatcacaatcacactgctcaatgcaacggaggcagccgtggcatcctggcgtgtaatcaacgcatggcctgtgaaatacacaggaccggatttcaatgccacctcctcagaggttgcggttgaatcactggagattgcccatgaaggcatgacccgcgagtcataataaattaataaagaaggaaagagaagggaaggccgcatagcggagcgaagagagccgctgcggcagtccccttctttggaatttaaggagaggtgaaatatatggcgtttcagacagaatatgagtttaccctgcccaggggatatctggatcgggacggtgtgctgcacagagaggggacgatgcgtctggcaaatgctgcggatgagatactgccgctcaaggatccgagggtccagcagaatcccgggtatttgagtattatcctgctggcgagggtgattacaaagttaggttcccttccgtctgtcgataccaggattgtagaaaacttttttactatggatctggcctttctgcaggatttgtatcagagaattaatacaatggactacccatcctataaggctgtatgcccacactgcggacaggagatagaggtgcccataaattttatggaggccggtctatagttacctatccggctgacaaaatatatgaggaggctgcttttatcggctattacatgcattggagtcatgatgatattatggccatgagccatatggaccggctcagatggtgtaaagaaatctcgaaaattaacagcaggctgaacgatgaaccggagaatgtctttgatgtgaggtgataacggtggcgaggaactgggagatggaccagaatggaaaatggtacaggaatgattatagcaattatgtgccgggttaccgttttgcggtttcactcgggaataatgacaattatgacaaagtctgtttctccaagatatcaggtatagagagtacgctggattatgaggaaatccaggaagggggctacaatgcgtcggcgcatctgcttcccgctcctcataaaaagcatgcagctcttgttttggaaagaggagcggctccctatgacagctggattaataaactcaaaccggggatgcgtctggggacgtggctggaggtggtgcttctggatgcggccggcaataatacggaacggcgtttcctaatccaggatggcatcgtaacgaagtgggaaatctccggactggacgcattaggaaataatattctggtagaaaaactggaaattatgcacgagggtatccgatattccaaataaggcaggatggataatatgaatatgctggcaggaaatccgcagtttgcagaacagctgataaggaaatattcgcaatttgaatcatattacttcgacgacacgacgcttgtattttataaggatgcagtgggagccggaggtggagcgtcttctgcgtataatacggagctgacgctaaaattgcttttaatgtttcagaattacaaacagtcaggacagcgtctgcatataaactggaatatgataaataatgctgtgatgaaaacagcggccgggatgtcacggcagatggaacattccatccgggaggttatatcccgttccgaaaacaggctggaaatacaggaaacgagactgggaaagttcatcagagaacagcaaggcaggggggcagagggcagccggggaacaggcggaagcggaatgcagcagagtatcataggacagcatggaggcggagagcggcagtatctcatagggcatagcaaaagcggagagcagcgggataacacagggcatagcaaaagcggagagcggcaggacagcaggagctggtatgggaacggaacgcagcaggcagcgctgcaggatgtgatactggaattaatgtacaaaaatacgattcaaacgggaggcggccaggccaggctgagaatcatcggaagtatcggaagagagaggctgaagctcaggctcagcagaacacgggaagaaaccgtgaggacagagcacataataaagtggataaacagcttaaaacccgatgaggccgcactggtatgcgaagcggcggcctgggcgtcgccagagctgtaccggcagatgaggcacctcgaagagacttgtataagagatatcaaagcgtccggctccgggcggggataacctgtgatgaagaagacggcggccgggaagggaaagacaagagagatacgtgggaaaagagggagcgaagtaaaaacgagctgccgccggagcttcggcagaaaatgttaatccgcatggcgggagaaaatccggaagagtttctccgtctggtaaaaggcgccttgaaagataacccgggatatcaggcggcagcgggcttagtcattctaaccggcaggacgttagaggcagagagagccgtccgttccggctctgtaagtccgtcagaggcagctgctgagtccggccatataattttatcagattgcgtcattgagcctgaacatagaggcatgacagacaagacggttttggaaaccgggaacatttccgggcgggagacacagacactggcctgtttattcagaaaatatgaggagcagattttcaccggttcggcccgcagcgtaccggatggggacagtgaggaaaaacggagggttttcaaaaatatagaaaccattatagattccgtgcatatccggccggagactgccgcaaatgcgggaaaagaactgattgagatattaagagacaattacaggacagaaggcaattctcttcttatcagtgaagaggatgtgagcatactggaactgtcggagaacgccgtcagggtgtttcgggagaatccccaggctctgagccgggtcagagacctgataaaccgggtggacgagacacacagggagaggctgcgggtgtggagtaagagcctgcttgagcaggaacagatgattgaacaggtaatgacggttatagaacgccggtttggcagtccaaagacatctgaatctgagaagataacagagacagtacataaagctggaaaagaactgacggaaatattaaagagcgtgatggaacacaaccatcggtatcacagtcagaatgagatatggaatacatcagatgaaatatggaacacgtcgaaagatgccgttacggttctaagagagaactctcagccggctgctctgttttgggaattaatcagccgggcggaaggaacacagagggaacagcttaaagagtggacggctgcctggggacatacagaggagtccaggccgttggctgcgcgggtgacgacgattatggagagccggttcagtgagcctgggctggcaaagcaggcggagaaggagctgtttgacatcctgctccacgatctttccatagaagagtcacaactggtgataaagaaagaaggcggaaaagaaaaaggaagagaagagacgcggagtgaatatgaaaaaatgaggctgttcctgagcagccgtgagaatgtggagcttatgcgcaggagaatcgagggggtctccgccccccggctggcgcgcctcagggagtgggtgaaccggtatcagaatgttatttccgaacagaaagagaaaacacggctggaggagacgagaaagctgatttcagagagcaggacggagacggttttgaggcttttgcagtcggagaaccggctggaacgggagaagaaagagctggtgactcaggttaaaagaacactgggagaagatgcggcacatcagttggaacattattttaaccgtaaaaaccaggtgactgggcaggaactgacagggcagacggaaaagcggacagaggagacggtaaaaaatattataaacgcctatgtcggaatcaccagaaaggaagacacactgaccaggctaaatcctggaagttatgtccatttggaaaacaggatgagagcagatgtccatgagccggtgtccaagaccgtggggcagaccaggcgcaatctggaaattctcacttccatgatgcgccgcgattacgatttcaaccgggagcagagccggtttttcactgttttgacggaacagatcggggagacggctgagacggttctgctccgccgggagccggaaaccggaaggcaggcgggagacggggccaggatagcgagcgcctcatgggatgagccggaatcaaagatgtcctatgcacacgggctggaacagaaccgtctgctgcaggcgggcagcattaaatcaatgcggttacggaattttgagcagacacagtctctacaggtgcggaacttagaaaagacacaattgctgcgcatacgtaatttggagcggatgcagcagtcaggcatgcggaatgcggaacaaatgcggttgctgcagccccgggactacgataggctgataaagcaaaaacggttatcacagccggagccgtatcatcaggcacagacagagtacagggaaccggcgcaaaacggtctgcgcagtgaatggggagaagcaaaaacggaatttttaagacggcagagcagacaggagagccggatcgaggagacaaggacaacggtcaggaagctgaatgagaagctggagcttcaggaaaagctggtggcggagctgaaaaagcagccgagacagccggagtcagcgccgcagttgaatattaatgttttgaccaagcagattatgaaaaagatggaaagtgaactgaggctggaaaaaatgcgccgcggtcttctgtaggccgtgagaaaggagatgcgggatgggaattaaaaaagcaaaactggtaatagaagatgtaccggagccgctggaggttatgtttaacccggaatcctataatctgtctttctcggcggcttacagcgagaagaaggtagcgggattggacggaccaatcagccagtatatcgcgggagacagtcagactcttgatatgacactttattttgacacgtataagccgccaacgctggcatcgcctcaggagggcgggacggatgtcacgaagctgaccagaaaactggccgctctcgtatttatcaagggttcgttacaccgcccgcccaaggtgacctttgaatggggcggtctgaatttttccggagtggtgactaatgtaaaacagacatgtaccatgtttctggcagatggaatgccggtccgcgccaaggtggatatgactttcaaatccgtgctggatgtgaagacgagcaagctgatatcgccttttgagtcgcccgaccgcactaaggtgcggatcatccgggagggagagagcctttggaattatgcgtgggaggagtacggtgatccggaacagtggagagccattgcgtccgcaaacggaatcatgaatccgctggatattgagccgggacagaagatcacactgccggccctgtaaagagggtggagcgaagaaacgtattttcagtgaagcaaaagaaggcgatgtaaaggagtggaaagaatgggagatctgatgaatgacagaagcaagatggaggacctgtattccaaatatcagggattccaggctccggctgtcaagattctgttaggtgagggaaagaccgatttgatcaaccgtctgaatgcccggatcgacggactgaccgtcaatttgtctctggagacggcggccagtgtgtcttttacgattgtaaacgcctacgattctaaaaaacattctttcagcagcggcatcatggatcagcttgcgctgggcagcatcgtaagagtggagctggggtacgtgtcctgcctggaaccgatctttaccggatttatctatgcggtcaaggcggagttcagcgatatggcaacgttgtcggtgacggcgctggatgtaagacgcgtcatggaggagtcggtccgtaagggcgtgtcgtggaagtacaccacgtactccgaagtgttcaaacaggtgatgaatccctataagaaattatattccaagctgactgttgacagtacgccggataacgcagtggcctcgttcatacagaatgaaagcgatctggaattctgtaagcgtctggcaacggaaggcaaccgtgagttctttgtatttaacgataatgtctatttcagaagaaaaagtaaacgggcttcggccctgacactgctatggggaagggatttgatatctttttccaaggagtccatctatgccgatcagaaggtgacggttctgggacttttaaaggatgggaaggacgcggtgagcgccacagcggcggttaagacggaaaataacgtaaagcaggtagtgacaggtgataatggccagacggtcagctcgcccacctcggattcgaaggacaaggcggcggagaaggcggagaagaaagcggcggaaatccgaaagaagaagcagtcgggacagggcgtatgcgtgggactgccgcagctggtgccgggccgtacggtgacggtggccgggctggagagccgtatcaatggagaatacatggtaaaaagcgtgagccatacgtttggcagcgacggatttcagacgtcgttcgagataggaggatttgactgatgggattatttgacgagatgctggagacggatgagacagaagacggcggtcaggcgaatatatatggagtcgccatcggagtggttaaagaaaactgggataaggatcacccgggaatgataaaagcggaaatttccctgggcagcagcgggaagaatctgacagactggattccggtggcagttccctatgccgggaaggaatttggaacctactttctgccggagattggcagtcaggtgctgctggcctttcatatgggcgacattaactgtccgattgtgatcggcagtctatggaaccagacggatgttgttccgccggagacggccaacgaaaagaatacggttaagaaaattaaaaccaagggcggcaacgtcatcaccatctcggaggagagcggaaaggaaaaaatctccatacagacaaagggagagctgaaggcggagctggacgatgaaaatcagaaaattattttgcaggataaagagggaaaaaatgcaatttccatcgattccaaaaatggcacgatgaactttaaaagtgaaaagaaagcagtatttaatataaatggacagccgatgctcactctcgacggagagggaaaagcggtaaagataaaagcggggaaaatcgaaatcgaggcggatcagtcattgacgatgaagggacagacggcgggccttgacggaaacagcctgaaaattcagggacagcagcttgaactgacggccaaggcgtcaatggcgattaaggccaatgccagcctgaaggcggaaagcagcggaatgacagagatcaaaggaagcatgctgaagctgaattaatgttttcggtaccattccacggatgaagaatgaaaggagaggcgcatatggcaaatcagagcggagctggcagttttctgggaacgggatggaagtttccgccccaggtggattacgcgaccggccgcatgaagacagtcagtcaggaagaggatatagcggaggctgtgatgctgattctatccacttccaggggagaacgcgtgatgcgtcctgattttggcagtggaatcaataaatttatctttgccgaaatgaattataccacagtccgtgagatggaaagagagattgtcaatgcggttaccgcctgggagccaagggtgatcgaaccggaagcggaagtgggcctggaacgtcttaaggagggaattgtgatgatcagcgtcagatatattgtgagatccaccaacaatccctacaacctggtatttccctactacatcaatgagggacaataaattagcagataaataataaaagaacagcagaaaggaggcggtatcattgagaatagaagaattatatccctgtacgaaggcagagctgcttgaaaaaatgaaagcgctggcggcatcttatactccggaatggaaactggatgagaagtatcccgatgcaggcacagtgttggctatgctttatgcagatatgttctatgataccgtgtgcagatacaaccggatcccggaaaagaaccaggccgcatttttcagaagccttggagcgcagcttaagcctgcagttccggcgtccgggtatatctgcttcagcctttccagcgatgaatttggcggtacggaggtaccggccggatttcccgttacggcacagggagagggtgaagacagcaacgatgtgttcttcgagacgcaggacagcgtgtatgcaacgccgtcaagacttgaaacggtatttctgatagacgggggcaatgaccggattcagtgcatctatgaggacagagaagagggcggaatacaaaacgacccgatttatctgttccagtcggataaagagaaccgtcaggagcatgttctcacgctcatccaggaggaggtcctgaacctgaagggaccggctcaggtgtgcctgcagattacaccgtaccgctttcaggagggagccgggagtttggactggcttctggacgagaagcagacggcttttgaatactatgccgagggcgggtacataagttttggaaaacgtttcatggagaatgacaggctgattttggagataggagccggacagcctcctctaagccgggaggaagcagacgggcaggaggggtaccggctgcggtgccggtatctgaaaccctatgtcagagaagattttacagtggaagagcttaggctgacctccagagccggacaggtggcgccggacgtggtacagacggaggcgggagaagaggaactgaatgaggtctatccattcggtgagcggcccatgctctacagtgaggtctatatcgcgtcggagcaggtactcagcaaatccggagccagggtaaccatgagttttcggctggattacgagaagacgcctctagatgcagggggagagacagagcggaactggaagctggtcatgaaacgggaggactttaaacccgatccggagtacgatattaccatcgagagggtaatctgggaatattataacggaaccggatggagccgcctgtttgacggaccgcagtacggacggattttcaacggcggagacggaaccatgggacagcagttcacgttggaatttacctgtcccggggatgcaaaaacatatttatataattccacggaatcacggtatataagaatccgggttctgaagatgaacaatctgttcaagatgaagggaaactacattacgccggtcatgagtgatattctcttctcctttgattataaaggccggggcagggcgccggacaggctggaaacgctcaacaatatggtccgccggccgatgaatgtggggcttttagggcagggaaaagtctgctggcccctgtttcaaaatctgggatgcacggagaagatgctttatttgaagtttacaatgccatttaaggatgggccgatccggattttattcaccacagaggaaacggttcaggaagagttgccgagactggcttttgagtattataccgacagcggatttaagccgcttcctgtgatggacgagacgcagcggttgagaaaaagcggtgttatcacttttatgggccgtcctgattttggcagaacgagcttctggggagaggaaggctgctggcttcggatcatcgatgcggaacgccggtaccggaagattaccgccgggacgaagatgcctgcggtaaacggtatttatatgaatgcatcccgggtgctggctgtaaggacgatgcccgaagagcgtttcaggatagaaccgggagaggagaaccagagatgtacgctgctgaaccagaatgtatacggcgtcatggtctgggtagatgaaggcaggagcctgacggaaattcagcaaaagagggcggcagagctgtttgagacggaggaggaacgcggtgaggacggacgtcttctccatttctggattaagtgggttgaaaaagaggatttttacctttcagagcaggatgaccgccattatacagtggatcggatgaagggaattgtaagcttttccgacgggcggaacggaaaaataccgtcttcaggggatggtgagacggtccggatccgctatacctgcggaggaggggaagacggcaaccagccggaacgggcggtcagccagatgacgaggacactgggatatatcaaccgtgtttttaatccgtgcatcacggcgggaggcagcagtcaggaaacgtcggaggatgccgtgagaaggagcgccagagccctctgccacggagatcgcgccgtgacggcatgggattatgaggcgcttgccatggaggcctcaggagatgtgctgaaggtgaaatgtttccctaactgcaatgaacagggagcccgggaaccgggcagtgttacgctggttgttctccaaaggcagttccggaacggaagaatctattttgataaagtgcgggcggaggtggagtcttatatccgtcccagaataggcggcaatcaggaggctttgagacgattttatgtagcggagcccaggtatcttgagctgcgctgccggctggagctggtagttggaaattttaatgaggtgtttgacgtaagaagacgtattcaggagaaaattgaggaattcctggatcccattacgggaaattatgacagacagggctggagcatcggaaggattcccaacgagattcagattacaaatgccataaaaggaattcccggaattcgttatatgaatgagctgcggatgtcggcctttatgaaaagcccccagggctggatcgaggtggacgcggaatccgtggagctgcgcagatttgccgttgccttaagcggcacccaccggatcgtcataacggtggagagctgataacggaagatgacggaaaaaggatagttgacaaaggaggcaggacatgttaccgatcctcagcctggatgatgaacgttttgaagagattgtggaaaaagccaggaaaatgattcccaatctgtccccggactggaccgactataattaccacgatccgggatcacaatcatagagcttcttgcatggctgaaagagctccagcaatttcatatggatcaaatcggtccgctccatgtcagaaagtatctgatgctcctgggagaaagtgtcagaggcaggattccggccacggcgcggctcacagccgattgtcttgaggaagagctggtactaccggggggaagctgtttttatgcatcggggatagaatttgaatctctgtattcccggtttcttcagccggtgcggattgtacagttgatttctgtttctccatttaagaagccggaggaggcgaagcggattgtcccggggggaaaaaaaatccatatccctgtgttcgggacaaggccggagggaggagagtctttctatataggactgtccaaacctctttcaccggggcgggaacaccggatttacttcagcttttatgatgattatcctgtaaagcgaaatccggtaaatggagccgatacttttgccccgctggctaagactaaaatggaggcattttgtaacggccggtttctgccggtggagaactggagggacggcacgtatcagtttttagaaaacggggactgctccttccttctgcctgagacgatggaggccggggaggaaggactgtactggcttcgggtgacgcttttacaggcggaatacgatgtgccgccgatcctggaatggattggcctgaacgagatagaagtttcgcagcgccatacgttaagcgaatgcctggaattaaaggcgcaggcgggagaaaacagacagatttatctttttgccgagacatgtctggccgcttcaggagaatatgagatctatcttccggactccgggaaagaagacgtctttcaccgctacgacggcccggcggagagaagaagcgccggaggaaccacagaattttgccttccgcagcttacggcccgggagggggagacgcttctgctgctctgctatgagtcagcattttcaggcagccggttcatcggtaccggaaacggttttcctcttcaggaatatgagactggtatcacggggctctgcggcgggggaatggttctgttagcagagaccctggaagaaagcggggaatggctaagatgggagcaggtagaggatttcaccggatcgaagccgtgggaccgccattatacctatgacgagcggaccggtatgctctgtttcggggactgtgacaggggaatggcaccggaaggaaggattcttctggcagccgggcacaccagtctggggcagggaggcaatgtaaaggccggaacaatcagccggtatgagggtcctctgaagctggagggagtcctgaatcaggaggatgctcacggcggagcagactgtgagacggaagaagactgtctgcgccggctgcaccggcggctgaagacagttgagcgggctgtgacctatgaagattatgaaacgcttgtcaaacggacaccgggacttcggatcgagaatgtcaaggcgataccggtgacggaacggaagcggcaggacggcaccatggatgaaaccagggtaacgctggtggtaaaaccttattcagaggatgccaggcccaagccgggccgggcctgcctggaagggattatgaatatgctggagccaaggaggatgataggaagcaaggtcagcatccttttgccggaatatattggaatcacaatttttgcagaaattgagacagacagctattaccagcagatacaaaaagaagtggggacagcgctttttaaccactttgaggaacggaaaggcagcttcggccggccggttctatatggcacggtttatggaatcatcgacgtgctggatcatgtgacgggagtaaaatcagtgagcctcaatgcccagggaagcggcatcaagcggagcatgaacggtgatatactgcttccggccaacggcctggcttatctggaggagtgggactgcatgatatcttcagccggataagattcggccggatagagaggaaggacagatgaaacagaagagaaattattttgttttaaataaagaatccgactttctgagaggccggagccggggcgttgctccggggacagaagggctgagtcttttagagggaagcagagaaggcagttattacacccgggtttttgacagcagggagaaacagacggtctggcaccgtttgacggtggaggggcatctcgacggcgtgtccacggtggaggtgacggtttttgcaagcgagagcagaaccctcatggcggatggaacggccgttcccatagataagctgatccatgacgataaaatctccgaagggcagaaggacagccggatggagccgtttaagagggccgtcttttactatccgaaggatgtgcttctgcaccggatacagggaagatatctgtggctgaagatcagtttttccgcgcagagagggttaagcccctcaatttcccgtatacaggtttattttccaaaggacacctggatgaagtatctgccggaggtctacgaaagagacagggaaagcgcttcctttctggaacggtatctgaatattttccagacggtttatgaagatatgacaaaacggattgaggatgcgccggctctgtttgaaccgtggacagctgcgcgggcgccgcttctttggatggcccagtggctgtcggttgagaacttaaatctctggaatgagacacagctccgatacctgaccgccaacgcagtccgcctctatcagtacaggggaaccgtccggtatctgaaggagattttaaaactctatacaggcagggagccgtatatcatagagcgtcaccagctggaaccatattttgataaatcgcctgcggccgcagatttgaaacggctttacagcagcggcacctatgaatttacggtactgctggatgcggagggggtggaggccaataaccgcgccggaatccttcgccaacttgtggagatggcaaaaccggccaatatggaatgtaagatcgttccgctgaaaccctatatctttttaggacaatattcctatctgggaatcaacagcgtattagggcaatacagggcattccagctggacggactgtgtgcggtgccgttttcagccgttgctgaagaatagaaggaaaggaaggtagcaccattgaaaaatttaaagtattttccatatgagaggaatcagtatttttatgggaaacttttaagcgtagatgatttccagactgagcagaaatatatgaatgataaaaggcggctgatcaaccgtttccttcacggctgcggtgttgtctgcggtttgaatgtggtacagattgacgactgcaccttatcgttggagacaggcctggcgcttgactttgcggggcgtgaaattattgttgacgcgccgctgaccaggaagctttcgatgatcgagggctttgactcttatactgaggaggatgaggacagcagttatctctatctgtgtatcgagtatgcggagaaggataaggagcctgtttacaatgtgacaggttcggcatctaagaccacggagtttaacaaagttgcggaaggatatcatctttatctgagcaataaggagccggaaaacggcaattacagcaataattcctactatgaagctcagaaggtggtctactggggaaatggtatccgcatcagccagctttttcccaaatatgtgaagagcggcgaagaatttgaatttaaattaatcgtggagaatatggggcagaagctgccggtccgtttttcttacgatctttcgttagactgcctgtcaaaggatgataaaaactggatgacgctggagttcgatgaggaaaattacgaaaaagcgaggcgctacgaggtgccgttcctggtcagagcggcagcggttaagaatataaagggcagggtacaggtgagaaaaggcagcttttctttaagtatcggcggacgccagatcgatgcacaggctcagtgcctgagtaagaccgacatcgtcagagatgatatcggtggcgtgatcagccgccgctattaccgtgaggcgatggaggagattgtaaaggatacgtaccatcagagtatttacctggccagaatcggcgtgattaaagccggtaccacatttgtaatcgacggaattgagcagatgccgttcaaccagtatgtgtacaacgaagtgctggcaggggtgatgaaccgtgtaacagaggagaaaatcaaaaagctggagcggagtgtcctgggaccggtgaacaattccccgggcgctctgcccgacggcatccgtccgggtcaggatgtgcctcagatggcgacggggtcggtcgtcatagatctgggaatcggagggacggcaagacaaaagttcttttcggaggagataacccacggcctgggtctgggagcggtgcatattgtcctcggccagtcatttggtcttaaggaggacagcaggattgtctatggggcaggggatatcttcgatgaaccggagcatacggtcagggcggagctgggagccagggcggatgtgacggaggggacctttgtcataggactcaggcttttggagacaacggcagcaagacaggtgaaaatatactggatggctgtaaaggacaggaaagacagcctttatgacagggaggagagaagtctctttattaaaccggatatgatctatttgaagcttcgtgaaacatattatttccagccggttataaccggggctgcagatcagagagtaagatggagaatcaaggaggcagaaggaggctctgtcgatgaaaacggtatgtacacggcgcccaatatcccgggaatctacgaggtgatagcagagagcgccgcttaccaggaacttcaggcatcggcgtttgtcgtggtcaaggaataaaaaggaataagcaggtggcatatggtaattcagacgatttctaaaacgtacaaggtgattaggacgctctccggcagcagtcagacggaggcttatttgtgcagagataatcagacggttttggatgaacgctacctggtccagggactgacgggttccggcctgtcacgggaaatagtgccttatttcatggaactttcatccaggcgggagaccggtgactttctggactgttttacgaacaaagggagcctctggctggtattccgctattttgaatataagacactggatgagaaaatggaggaaccgtttcttctggctgagaggctggaagcaagccgcaccctgatggaacgcatgatagctcagaaccttccccattatctgcagtatgaggcgctgaatccggataatctgacaatttcggatgcctgtgaggtattttataactatcttctgtgggaaccggagttattaaatgcctgcgggatggacgaggtgtgtgaacgcctggctaaattctttgaacggctgtttgctatggagctggaggaggaaatctccgatgaactaacgggatttgtcaatggcctcagggagaagcggtatcccggttatattgcggtttaccgtgattaccgggagctttatgatgccatggtaaaacagcagagagaggggcggctccggccaaaaggatggcttattcgtatgtgggagaagttcaagctctttctcaaaaagctgtggcgttttttatatgttgcactgattgccggcctggtgatttatctgatttatctctatgtgaaaccaaaggatataccggccggccggattgaatttgatcagatagggactcttaatctgaaaaaaggcggggaggcaaaagagacgcaggagccggttgcagaccaaagcacgttttatgcagagacgatggagaatggagataatccggaatgaaatcaggtaattttaagataaaacaaaatatgcagtacggcgccaataagctgatgcaggccattatctatccttttaaccaggcgctgcgcgccataaaaaggaaactgaatcccaacggttttgtcaatgcagtagtgaatgatgtgcgcaaacagatgaatgacgtcatacagtccaagccggcatcgattagagactattacgggatcgggcgctattatgcggccaaaaagctggtttatcttggtgcagtcgtatttcttcttctgcttatattcctgctgcgctttggctttccgtgggtgcagtcaacattctttacgaatacaatggtcgtcaattcggccgacatgtttaattatagcggtaaagtgaaactgaaggcggaaaaatcaggtcctgtaatctttaaaggccgtctgatggacggcaggataaacggagatgggactctctacaatttagatgggaccctcctttaccacggaggatttttaatggaaatgtattccggatatggggaactctattatccgggaggaaatgcacattataaagggaattttgaactgaatcagtatcaggggcaggggtatctgtattttgaaaacgggaacccacagtacgagggggcttttgcagccggactgtatgaaggaatgggaaatctttacagagaaaacggaatgctgcagtaccgcggcggttttgcggccggattatatgagggtcaggggaccttgtatgatgacgcaggacgggtggaatatgagggaacgtttgctgccggacgttacgacggagaggggagtctctacgaggccggaacgctggtatatgccggaggtttttcaaagggactgaaatcagggaacggaaaactctataatgcagacggaagaattctctatgacggggaatggaaggacggcagccctgtggagggcaccggcgttttatttaataaagacggaacaggaattaagtatgaaggcggaataaccgacggcgtatacaacggactgggagccgagtacgcggaggacggttcgctggtttataagggagattatgcggacggcctctatgaaggtgaggggaaactcttcagcaaagaaggaatcctgctctatgagggggattttccaaggggaaatacaccgggaaaggcaggctctacgaaaatggaaccgggatcctcatttacgacggaaactgggtggaaggagaaccagagggagacggaacactctaccttgacgcagatcatgtcctttataccggcggattcaaggcgggcaagtatgacggaacagggcttttatacggcacggagccggatgcgggcacgggagagcttcccaaggaatatgagggcgggtggaacgaaggaatccgccagggggaaggaaaggaatatctgcagggcgtgcttcagtatgaaggaacctttgaggagggaatgtattccggagacggaattttctatgacacggcgacaggcgccatcgtttataagggcggttttgaaaagggcgagcggagcggagagggaattctctataatcccctgactcagctggccgtctatgagggcagtttccggctgggcctatatgacggaaacggtaagctctttaacgacaacggcgaactggtttatgaaggtgaattccagctgggagataaaaacggcaacggggtcacctatgacggtgcaaccgggattgtggtggaggaagggatttacaggaaaggcgttcttgtgacaagcaaaaaggacgcggataaagccaggtcggaacttgaggcagaagcggaggaaagcgccggcacagccggtgacggcgttgacggaagcggaccgggagcctcagagaaggccacaggttcacaggagagcggcacagctgaagacgaccggaaaggcgccgcgggaactggcgcaccggccggggagacatcccggcgccgaagggaccggcagatgaagcaggacagtaaggaggggcgaatatgagacatacggcaatagcggaggctggaaatacactggtggagcttttgcggacccacatggtccctgagacgattatgaatccggatcatatcggattatgcagtccggcggacaagggggatctggcattagggatctgtctctatgatatcagagaatgcgaggagataagaagccataccatgatcatgctggatccgtccaaccagaagtatccgcccagttttctgaatctgtattatatgttcaccgcctactcgaatggtgacattaaataccgtgcagaggaggagcagagaatactgggaagaacaattcagatactctgtgaccacgctatatttgaacacatggtgcagggcagcggcacgccggacggtgagacggttcccacaattgagattcagaatctgacgatggaggaaaagatgcggatctggagcgtgcccaataccgcctacaagacctcgcttttttataaactgggtccggtggagattgagtctgagaggacaaagggcgcgcagagagtagtggatgccgcgtttgcagtcgaggaacataagggcaggagggattcttagatgcgtgactcgatacatatcagagcttccctggctgtgcttctgatagatgattttacaggtaagattataacctccccgtctctgcgcgtcacggcgtgcggaggcggaaaaccggtgcggaagccggagggattctgggtctttttaaacctgacgtccccggagacggaagtggcggtggacgggccatgctattacagcgagaggcagaccatagcgcttaaggaactggacagcgcaaacccggttgtaaggctccgcctgaagccggatcggacttacaaactgccgaaaggaacactctgcatgacagccgttcttcccaaacttgcctccctgatggtctttaacgagcaggggagtgattataaaaagctgctggccgattacgagaagggcagtaaagagatctccctgtatcagggaggaaaggaagaactggaaggaaaaatttgctgcatcatgggtaaaaaagagacaaaagagtgtatccgtcttggtaaacttaaggatcgggacaaagggatctacctgctggatcagaccctgaaagacagttataaaaagataggaaccaaaatttacccggtcagctacataaaggcacaggacgcgggggaatatttcctgccgctttcgggaggcgggcgggcggaggccgaatatatctgcctgtttgagcaggacggaataatagaagaacagaaaattgtgatgaaagaaggccggggaaccggataaggtgggatggcccggatgtgaagaagataaagcggtaagcggccgggaaagcagaagaaaaggtgaaagaaggaggaaagccgcatgggagcgcaggagtattatcagagcaaagaagcgtatataagagaaatcctcagctgggtcagagaatggattaagctttaccgcaaatatgcggtttctttggatgaagatggaagactccgtcagctaaaaggttccattacatatggcaatgatctggaattaagcctgaacgggcagatgtcagatgcagataaatcttcttatgaagaggaagcaaaggccttgagaaaccgtcttgggatattcagaaagaaagcggctgcctcgtttcggcatggaattgcaataccgatggagtacctgtttcaggtgtttcagttaagcgaagcagaatgtttttgcctccttctttcctgctcggttgaatttgaacggactatgggccggatgtttggccttttacaggatgattataaagaaaaatacccgacgctggacttgtgtctgaaaatttatacggcggaggaagaacgccggtttgaagaattagccgctgtgttttcacaaaacagcaacttctctctatttattaagaaaccatttgaaaacggcctggatcctgtgcggcttcatccaagaattctccgattcctgatgaattatgaggagggagatccatccgttgaagaatttgccaccctggttttccccgaacggatacaggagcccgcggatgctgaatatgagaacgaatcgcttattgtaccgctcagcagggccgcatctagaaaagacaaaaagaatatctgctttctgtacgggccggagggtgttggcaagaaaagactggtgaaccgggtggcggccggatggaacaagccggtgctttttatagacatgagaaccctctggcaggacaaagggcaggcggacaaagtgacggaggatgttgtgcgggaaatggtaatccgggggcggttccctgttgctgccatttcgagagtgtccagccggacgacgacagccgggaagagaaaaacaggaagaagcggtttatggaccggctgttccggcagctctttcgtcacacggactgcctgttcctcacttccggaaaaatgtgggaaggagagtggaaccgcccggagcttgcaagaaccgactgggaactgcagtttccgtctgccacggagcagatagacctctggaaaaggatgctggagccggtattcgtacagtctgtcacgccggaggcgctcagcgtgcgtttcagtctaacgccggggagaatggcggaggctctacgagaagcctgcgataagagctactctctgggaaaggaagctcccggaccggaagaactctatgatacgtgcaggaggcagctggtcatgaacatggggagccatgtgacgagagttaaggctcagtatcagtgggatgagttgattttaccggagcggcagaagaaggcattaaagagagcctgtgatcaggttgaatataaacacctggtatacgatatctggggattcgagcgtaagattgcttatggacagggagtatcaatgctgttctacggaccgcccggaacaggaaagaccatgggtgcccaggtgatcgcaaatcagctttccatggagctttataaggttgacttatcctctgtgatgtccaagtatatcggggaaacagaaaagaacctgggaaatatttttgacgaggtaaaaaaatcaagaagcatcctgttctttgatgaggcggacgccctgttcgggaagagaaccgaagtaaaagactcccatgataaatatgccaatgcggagaccgcttatctgctgcaaaaaatcgaggagtatcaggggattgtggtactggctacaaactatatgcaaaattttgacgaggcatttaaacgccggatcaaattcataatagaatttccttttcctctggccgaatacaggcggaagatgtgggagcagatctttccgcagcagacgccgatggaggagctggactatgaatacctggcggagaactttgaactgtcgggcagcagcattaaaaatattgcggtagcaggagcttttctggccgcatcggagggaaatccggtgggcatgagacatattctgctggcactgcgtgacgagatgataaagtcaggaaaaagcatgccgccggaaagctttggagaatactacggactcgtcagcgggttttgctgatagtggttggagaggagaacggatatgcctggtgaagaagaagtaagaaaagacaaagacgaacagacggaagaaatattagaaacaccggaaggcggggagacgggagaacatcagacggaggagacacaagaagcgcaggtcgtggaaccggaaacgccgcctccctcggcagaagagacggtggcggaaacgccttcttctgctacgcataagaaaaaacatcatcataagcaagggcatgatgctgcggctaaggcgctgtaccataaaatacacgctgataagaaggcggtggaaggaacggaagaaaagctccggacactggaaggccctgtagctgcggtaaggtcggatgaggataaaaattccataaccgacaccctcctgcaggaatataaactcattgataatgtgaagtccagaatcgagaatcagtatgcggatgaggcggaagggctgacacataataaagacaaaaagagaatgggcaggcgggtggagcggctgagaagtaaaaccgatgccgtattagagctgtatagagcgaacaggaagacgctggacgagagggaagcagaatacaagctggatgattttgatgaacgcctggcagcgctgaaggaagaccgccggaagactaaacatgataaagggataggcaaggtaagttatcaggattacagagcgataaaataccggcttggagatatgatagcagaaggaaaaaacctgcctgccccaaaatccgagaaagcaaaagaacgtcaggaaagcattaacaagcatattgctcatgagaagaagtatgttgaaaaactggctgcttacatgcctaaagaggatcaggagatcagcaaaaaaaaggaagcagaggcacaggaaaaaacaaattctctaaatgcttattacaaggcgagcatgccatttatccgccttatctttaaggcgcgcgccgtaaaggatatcagcaagccggaagaaactgtctggaaaaagatgaaggcaaaggccggtgaggtaaaagataagtatgatgagggcagcgaatttaaagaaatgctggatgacacaaaagattcgggacagcgttcagcgacgcattgaaaggaaaagaaagctcagatgaatcaggcgggctgatgggatggataaagacaaatgggaaaacggcggtccgatggctcaccggaaaatttggaggtgataaatcagaccaggacacagccggtgttgtatttgaggagctggcagactggtttgagcctcttgtatccgtcggaaaactgtttaaaggaattaagtcatttgtttcagatattggtgacatgtcatgggaagaagctaaagacgcagcttctgaactaattggtaacagtatcgaaacagggattgatatgctggaaacactgttcgataaactaaaaatcattccatttttcggtgaaattgcatcggttgttaaaggcgctgtcggagtggttcaaaatgtcctaaagtttatagataaaaagaaacaccgggatgaagcaggtaaaaacaaggcagcgctcaaggaaaaaatgttggaaaaacaacaaaaatacgcttcaatggatgacacaaaaggattaggcctctatgattttatgggtaaagccacagaaaagcacggcttctttagaaaaacggagacaaccgaggtccatgttggcaaaaagacgtcgaaagacacccgaaggaaaaaaagtgagacggccggcaacaccacaattgaggctcagatggagcagcttcaggaggtggatactgaaaaccttcaccaggatttggaagatatgaaggagaaaaaggacagaggggctctttcactggaggaacgccggaaatattataagatgaaaacgctgaagacctcgcgtgagtacatggaacagaaagcaagtgtcagtgtcaacaggaatcgaatgcgtaattcgggatttgagattgcccatagtgcgcttgactgcctttcaggcatatgcggattgattcccggcgtcggtacggctgtatcaaccggcataaagttctttaatgcgacttcaaagcttgcgcacaagggatttaccaagggaagaaagctccttcagggcaagggcgtgcaggaaaaaaaggacaaagcccggactggtatggcccagaatatttttaatcagatgctgtttgtctcaaccgcaatgagagacaaagaggacgacgagaaagagccgctgtttaatgccggtccggaatcgatacggcgggtgtcaaagaacgtggattatctggaatctacgacatcaacactcagttatcagatcagtgagatgctgcaggtaaaggatcgggatacgcttcttgataagatggcgtccgcattttcaacagagggataaagaaagggtaaagatatggcagatatagaacgtgctgagcttaaaagacagtttgaacagattattgaatttattgacggtactgagatggaggcgcatcttttggaagagaatccggccgtaccggcattgtcccttctgatgggactaccgggggaagtggaagaggggcattacatcgtctgcaatctgatgccgctttccgaggaagaatcggcctatacgaattttctccagatgttttacgagattccctatgaagtgggcgatctggatgagatgacgctattaaaagcggtgaatgccatgaatgcgtccatggtgaccggaagcttcatgtatactaaaatgccggaacacaaggcaagaatccagtaccgcgccgtactgacgtttgacgtggaggaagacctgaatccaagcacgatctgtgagtgcgcctgcctcctgctccggtatgcgtctgttatggaggagtttgtaaccggcattgcgggcggaatgaagctggcggatatttttaaggccgagggaatggaagaggaggagtggtaaatgccattagcagtatgtatgggcgctatgtgcgcctgcagctttggagcgtctccgtcgacgctcatagtcacgccggagaaccggacgatggatggagcaatgcctgcggccaccattatggacagtgttccgatgaaaaatatccttccatttggaatgtgcagctcgatggcaaatcccacggtggctgccgcaaccgccgccgccctgggagtcctgacgccgatgccatgcataccggtcattacaggtccctggtttcccggctctgcgaccgtgctgattggaaataaaccggctctgaaccagagctgcaaagccatgtgcgcctggggcggagtgattcagattacgaatccgggtacgacaaatgtccagataccatgataccagacagcggtgttaaagcacccggaacataactgttcatgctgtcgttgtcaatccggaactgtcaaaagataaaaagcaaggaaggaaatgcgtatgaagctgaagtttggtctaagagccagatttatccttatatttctggtattttccgttataatatccgcagcgagcggatatattacgcagaaaaagtatgaggcaacaatactgaagcagtatcaggacaatgcgattcagactgccaacctggccgcttcatttattgacggagacaagttcgacgaatatgcagccacacttcagaaagatgaagcatatgagatcacccaggaaaacttaaaccgtatcaggagaacccaggatgttgtttttatttatgccctgaaagtgatttccgatacggagaccctgtatgtatttgatacatgggatgaaaatactccgaaagattcgattggccggctgggaggcagggaaccttataatccggagtacaagggattgccaatgccctggaaacgggaaagacaaatgataagtttgagattaccgagattacgagattcgggtacaatgcaaccatttacgctccggttctaaacagtatgggtaaagcggtgggggtagtcggcatcgatgtcgcaatgaatgatattaagtctacggtaaatgaagccgtaaccggtcttttgagtgtaatgctcctgattatcacgctctgctttcttgcacttctggtagtggtgcaaacggaatttatccatccggtacgcgttttaaaaaactgtgtgcaggagatggccaacggaaagctgggtgtgcaggcgccggtgaaaggaaataacgaaatatctgaaatatccagaatctttaacaggatgtcctttaatatcagtgtacatatgcaggaaatcaccggtttaaatgacgggtaccataaatttgtacctttagaagtgtttaaaatattgcagaaaacagacattacgcagatacgcctgggcgattacaaagagaccgtgctgagtattctcagtatgcagataaataattttgacaagataacagagatgaaagagtcaaaaaaactgtttgcatatattaatcagatttacagtgaaacagtgccggggatccagaagcgcggaggtgtcataggagaatattacaagggtggattttctgccttctatcagtcctcttgtcaggatgtattggacagcgcgattatcgtatgccagcatatgaataagttaaaaaagcagggagagctagaagaaagtgagcggttcagcctggcttttggcatcagccatggctcagttatgctgggaattgtcggaaatgacgaccgtttttcatcttccctgatttctgaacagattacggcatcggaatatttaaaaacaattgcctggaaataccgtgctctgattcttattacaggtacggcagcggaacagattcccggttttgaacaacagtacagccaccgtctgctgggtatgatgtattttaaaacaacgggaaaaagagagaggttttacgatgtgtatgacggggatccgtcagaagacagagaaatgaaggaactgacaaaagaaaaatttgaagaaggagtaaaaaaattcctggcaagagaattttacgaggccagactctgctttattgaggtactcaagctgtacaggcttgactatgctgcgagagaatatctgtatctgtgcaaccagtattaccagatggaagaagacgcacaggaaatccaaatctgtattgaagagtgctgattcggaagacagaggaagaggataaaaggagccaaaaaaggagcagaggtggagggatttttttaatgcaatggagatatgcgagatgccggatttcaaaatgctgacgctggatgacggcccgattattaaaaaatataaagaagatatgaaaatcagcgatatggaatttacacagctttatgcctggcaggagaattttcataaccgttataagattatagacggttatttctgcgctctttatcagagagatgacggctcctgttcctgttatgcaccgcttggaacctatgagaaagacagatataacagcgcgctgatgaaactgaaaaaggagctggaggaacacggcctgccatttagattcgattttgtaccggaagactggctgatccgttttgccgtattgccgggatacaaagcatatatggattgcaatgaaaatttcagcgattatatttatgatgcggaagattttttgtgtttaaagggaaatgccaatgaacataagcgttatctggtgaactattttaaacagcactataattacgaatacaggtgtctgaatgaagaaaacagagatgacgcttataaggttatggagaactggtgccgggaaaaggattgccaggattgttactggggatgtgaaaaacgctcggttttcaaaattctggaggcatggcaggcatttgactgcaaaggggcagtcgtttatgtggacggcgccgcaaaagcttttatgataggagaacagataagccatgatatggtggtatcgcattttcagaaagcggataagcatgtaaaagggctttatgcttatttgagcaacgagttttacacaagagaatacccgggaattaaatatattaatctgcaggaagatatggggattccggcgctccgggactccaagatgtcctacaggccatgtcatatgctgcacaaatatacggttacactcagaagaaaaaagagggatagcatatgaaaaaaacaactgacttgaaacgtgtttataaaaaaataatactgctgtctgtactgatggcggcatgtatcatttttgtaggaatcaatgcacgttatttgaaggagaatccgctgaaccgggattttgttttagattatccttcggccagtacggcaggcgaaaacggcaatatttatgtgattgatcaatccaagcagcgggttgcggcatttacaaaagagggcaattatctgtttcagattccgggaggaagcaggagcgccaagtccttttattctgcagatgacttaaaggtggacggccagggcaatgtctatgtggtggatgtggtgctttctctggacggtactgcgattgagaaggaacggattgtcaagttcgatgctaagggacggtactgttctacggtctgtgaaattgaatatgaggagggaaaccgccctcttacaaccggccggattcagggcatggcgctcatggaggacggaatttattttgtttataacgagagagacagactgtcccttcaaaaaatatctgcggatggaaagtcggaaacggtaaaaaccatcccttacgatacaaagaatcttatctcgtttgccatagataagaaagattataaaatttatgcagttactaaaacagctgatatcattaaaattgaagacgacggaacgtcgcaggccatctataaaggcgaggaacacaacagtgatgagtttttcagcatcccgtggaagattgtgacggatacgttgggatatctgtatttcaccgatatcggacagagaaacatcggctatatttcaccttccgggcttgtgggcattgccattgaccgtgaagatcaggagcagcttgggaataacaggattttttacagcctggacatctcgcccaaacgagtgctcaccagcgtattgtcatcagatgtctgcacggcgcagctttatgggaattcggcggatattccggtcaggtatggagtggacgagggatgcataaagacagaatactccgacagttacattaccgtcagggggcggtttttctttcggccctgctggccgtcttgcttctgcttctgatcatttaccaggtgacccggctgagaattaaaattgccgtcaccgagatggcgaagaacaattttattattatcagtgtggctgtcactattgcagtggctgccgttccgaatattatggaaaatatgcaggaacagtaccgtgagcaggtaatgaagaacatgtgcagtgtggcggagctgacctgtaaatcactggatccggaggatgttgaggcgatcaacaaaccccaggattacacgtcggaggcatacggaagggtaagagctgatatccagagcagtttttccagctccaatgggtggaatgaagggctttactgtgttttaaaccgcgttgacccgaataaaattatttattcatgcctctatctggaggacacaatcggcgctgtatatccgctggattatgaatattacggcctggagtacgaagaattgtatgagacgggaaagcagatccgttttgactggattgagaatacggatggaatctggtcctatgtgctgtcaccggtattcaatgaggacggggaagtcattgcggcaatggaggttggaaccaacctctacgcgttccaggaggcgaataatgcaatgatccggacgatgatcttcaatgtcgtttccattgtggcaattatgattctgatctttacggagctgtcattcctctggttttacagggaaaaggcgggacgagcggcggaagccagggcggccgcaggtgagaacatgaatgagataaacaggaaactggccgtctacatcatccgtcccatgatatttatgatattcatggccgactgtatggccaccgctttcctgccgatgctggctaaccagatggcagtgccgctttggggtatcccggcggagcttatgagtgcaatacccatttccacagaggtgcttctgacggctattttctccttcatgggaggtttcatgctggagaaaatcggtttcagaaaaatgatgattgccggaagtattctgtttactgccggattgacggcagttggatgctccgcttcaatccttccgtttatcggagcgaaggcggttatcggtattggcgtgggacttcttttggtcagcattaacacgctggttgcgtcttatccgccggaggaaagcagagaaggtttctctttttataattcaggttccctggcgggcctgacggtgggtaccaccgttggttcgtttctggcagtgtcacttggatatttaaacgtgtattttgtggcggccgctgtgtcactggttgtcctgattatgatactgaacatattcaagaaagatacggtttatccggatttgaaggcagaagaaggagaggacggaacaggaaagatcagtatagtacggttcctgtttaaaaaggaacttattattttctttgcatgtgcaatgataccgtatctgttctgcggatattttctgaattatttcctgccgctgtttgctgaatctcagggaatggccgagactgcaatcggccagctgttccttattaacggcatctgtgtcatctacctggggccgtctctgacatcgatgctgacaggcaggctgaaactgaaatacacggtaattcttgcaggagcaatttacatcgccacgcttttcctctttttcctgtttaccggaaacggaatggtagtcgcaagtgcgtttctgttcggtatagccgacagctttggtttttcggcgctgtccatctatttttccagccttgacacggtcaaactgttcggcagcggtaaagcgatgggcgtatacagtacatttgagaacatttcccagacattggggccgttcgtgttcagtgcggtatttgtgctggggattaagcagggaatttttgcgattacagtggtttatctgattctgctcgtgctttatactttatttggaaagaagatagataagcagtgacaactgccggtgtgtaagcgaaaagcccgcaatgcgggcttttcatggcatgaatcaaagaaacgcggaaagctgtattacggttcgtccgtcagcttaaattgtccaatcaattccttcaacagcagcgcctgtgcggacagttcttcgctggccgccgcgctctcttcggcggtagctgagttgagctggacaacatcggaaatctgcgtgatactctgatgtacctgttccacggagcgggcctgatcgtcggaagctgaagaaatctgctcaataatcatctccacctctttaatgccgtccaggacattcttgagagagacagccgtttcaccagaaatacgcgttccgtgttccactgcttttaacgaagcggcgatgagggacgtcgtgttatgggacgcttcggcgctctttgcggccagattcctgatttctgcggcaatgacggcgaaacctctgccgttttcaccggcgcgggcagcctcgacggctgcattgagggacaatatatttgtctggaaggaaatatcttcaattgcgctgataattttacttatctcgttggagctctgtcggatgtcctgcatagccgacagcatctcctgcatgcggcggttgcttacctcggcttcatttaccaccgtagttacgctcatattggcttttgaagtgctgctgacattggaaataatctgctgggagatgtcctctatgaccgccgccagttcctctgccgccgcagcctgttccgtagcgccctgagccatcgactgcgcgccgcaggccccctgttcggagccataggctacctgctgggcggatgagctgatttgggaaagcgtataattcagggattttataatttgctccagggcatcccctataaaagaaaaatctcctaaataattaccgtctacggacagtttcagattgccccgggaaatttcttccaggacgcgtgtgacattatgaatcatatccttgagagcggcaacagacgaacggatgctgccggccattctgccgatttcatcatctgtccggccgagaggaatgtcgacgcccagattaccctgtgagaaatcttccatgcttctgctgataccggcaagaggcttcatggtacggtgtacaataaacacgataacagttgtaagtccggccagaattatgagggacagcacgcccagtatggtgagcagccggttgcgtgtcgcatttacctcagaaatcgggagcgtggcgacagccagccagccggtggttgcgctgtttctgaacatggaggtataccggatgccgctataactgaagttgagaacgccattataattgctgtgaaccttatctttatactcctggggatatcgagttcggaaacatttctgcccgatgcgctcggatcgtcgctgtatatgtaatccgaattattggagataagttcaagataaccgtgttccccgactttgatcgatgagattacctggcccagactgcttaaatagacatctaaaccggtcagaccggcaatctcgctgcctgattcagaaaaaaccgggtttacgatcgagacaatgatctctccggtggcgggatccagaaagggatcggaaatcacgatgtccttcgtggtaagcagccggtggtaccattcattaccgtcaagatttgccgcaacggtactgccgtcggaaagcagataggtgtcagtatcggaatcagccgcccaaacctgcagcactttctcattctgcataagacctaacgcgtcggacaattcttttaacacggcatccatattatcataggtgcggatgtcctgaggggaagagacggcctcaaagtagttctgcagcgtggaattctcttcaaacgttcctgccacggctattttccccctgaaaaaatcatcgacggaagccacggcgtaatcggtctgggcatcgagcagccggttattcaaatcggatatggtaccggcagtggcaaagcaggctattagtaccagtataatgagtgagggaaccagaactgtcaggatactgagattgattttgaatgagatggttttgttccatttagtggtctttttccggcggaaaggttcctctccggatggtgtggcggttttttcatacatagtgtttcccccgaaatttgaattgatgtacagtacgataaaaagcatgagccatgaacgtatcactgccatcaatgaataaggctatggtaaagttgttcaatctacgaacaattataccatagcctttttgatattagcaatgtaaatccgccggggtaagcttggctattgattatgggagagctgtctctgtgttaaaacaatggttcagcattttcagaagctcctgaatctggatgggttttgataaatgcccgttcataccgatttgcagtgacttgcggctgtcctcactaaaggcattggccgtcattgcaataatcgggatggttcgggaatcggccctgcccatggtgcgaagtctctttgtcgtctcaattccatccagaaccggcatatggatatccattaaaatggcatcatagtaaaaaggttcttttttacagaacatctgaagggcaatctgcccatttcctgctgtctctacgaaaaagtcattcatttcaagaagggtctgggctatttcacggttaatttcattatcctccacaactaaaagccgtttgccgttaaaactataggagggggactcatttaatatttcgtgctggggtgccggaacctcgctgtatgggagagagacggtaaaaaagaattcggagccgcggccgggttcactttttacatccagaacgcctcccatcatctgtaccagccggctggagatggcaagcccaaggccggtaccgccatattgtgaagagatattttttgctccctgttcaaacgcgttaaagatagacggcaggacttccggggaaatgccgatgccagtatccgccagtgaaaagcgcagggccagcccggtatcttcttctttaacaggatgaatatgaagagtaatggaacctcccacatctgtaaatttaatggcatttccgatgagattcagcagaacctgttcaagccttagctgatcggctgttaaatgccgttcggtacggcagtcattttgtatggtaaaggaaagtccctttgcttcggcctgcatccgcaccatctcgtctatggaggacagaaaggatgaaagaagcatcggtgttgggttcagttccattttcccgctctcaatccgggacatatccaggatatcattgacaaggtgaagtaagtacttgctggagttatcaagtttttccagacattccaatacctgctccttatttccggcggcagaacgtgcgatagcggtcataccgacgattgcattcatcggggtccgtatttcgtggctcatacgggaaaggaaatctgtttttgcctggctgacggcatcggcacgggctttcatgacaaaggagggaacaattttaccaatctccgccagcacacggcgctgttcttttgtccagatataattttcctggcagacttcgaatccgatggcgccgatatagacgccgttattccatattgcaaaatggaggcaggaggggaatggggaaatctctttgttcggacagacatcgcacagcccgtcggatgcataccgcatggcggcagcctcgtatttttctcgggtaatataataaggcttatttatatgaatataagacatatcatttgaccactggtatgtaaaacggcaggagaggaaagaaggatcaatttcaagcagggatacacggtccatatgataaatctttccaattcttgcgaacaacagggagacggcatcctccagatttttcgatttccccagcagatccagagcgaaggatatcagattttctccgcgctgcgcatcttcctgttcaatagtattgacaatgtatttttccgtatagagattggtcagcataactccaagctcattggaggtgtcgagatagcaggcggcgtgtccacggcagcgctctttgacataattcagcgtactttctgcgcatcggtagaggccgctgtagttattgacgacttcggtggaacacataccgatactgacgctgatccggctctctctgcccggtagaatcatgagattttgaacctggtcggcgatacggggccgagcacggtagcctgttttttatcacaattcctgataaacagcataaactcatcgccgcccagacggatctggagatcctgttcagaggtggagccgcgcaatatatcggccacttccagaaggacggcattggcaaaggaggttccctctttctcattaagctggccgaaattgtccatatccaggagcatcagaacacagttttccccttccggtttttcctgcatacatttctgggccagccttgtgccggtctccttattccataagccggtcaggctgtcacgggatttcgcgttttccagcgcgctggccattcccttctgattggtaatgtcttcaatgatacccacaacaaagtcgggccgcccgtcttccgtccaggtaacggttgacataaattcccggcaccaggagccggagagtgtctggaactctgcattggcagttcccaatccgttatggatggcctcatacatttcccggcaggcggcgtggcaggaggggacgacaaaggaatccaggaagctgtccggcatctgttcataccgttcgctgcagtgatagtattcacaggtacggcggggaatgacacaggtccggattaacggataataataaaattcacagattgatgtatgttctaaggcaatattcaaaatctggttgcgggcttccagttgtgccgccagccggtgattttgcagtattgcctgcttattctgatcgatattgagaaaaacgctgtggttcagcagatcttcacccgtgtcctgactgacggagccggagacaccctgtaaaacactgggggcggacatatgcacagcggcaattttccagccgtccggagtatggatgcaggcagcgcttatcctggcctttaaagtgaagagcgggccggaagagacgggtctcattattgttaaatcagccataaaaacagcgtcatcctgggataccgacgtctcacaggagttagttaattccggcagatagggctccggatcctgggagtattcttctttcagggcagcctccaccttctggataccacacaggctgccatcggttccgatgccgatccattggatttcatctgtcagaagagagaggacagtatttatgtccctttttttcaaataggcgtctaaaaaagctctgacagtcttttcagctgcgccgttcgttatgctcatataaagttcctccagagccagagcagttgctgcccggccatgtgatttattggatttgatacgctgtattttataatttctgcatgtgtttttattgatttaacaatatcatttatgacgggattttgcaatggagatttagttgaggttgggggacccgtgagccgtaactatgcaactcatggttgcatcatggtaaaaatgcaatctgctatttttagataattatatctgctagaataaaatcattagaaaatattatgattccggaatagtatacgaaatttaaaacgattgaaattctggtgtctgatacgtgacatggacgtatccggcttcaggtaaacagggagaaaacaggaggacagaaatgccgcatattttatcagaggaaaacagagagattcaggaaatggccagagagtttgccgaggcaaagataaggccggtatcaaaggagtacgatttgaagggggaaacgccgctttcggtgtataaagaagcagccgggctgggatatacgtccctgtgtattccggaagagtttggaggagccggacttggcacatttgccaatattcttgtagcagaggaatttgccagggcagacgctggattctccgttgccgtacaggccagcactttggcgatgaagccgattcttcttgcagggacgaaggagcagaaacagtatgcagctgacgcgctgatcaacggaggcatggggtccttttgcctgacggagccggacgcaggctctgacgcgggagctatcaggacaaaggcggtaaagaaggatggggagtacataattacaggccgcaaatgttttataaccaatgcaccccatgctgatttctacgttgtctttgccaagacggagccggacgcgggaacgaaagggatttcagcatttcttgttgaacgcggcagagaggggctttcgattggaaaacacgaggacaaaatgggaatccgcctttccaccacggctgatgtgatactggaggaagtacatgtaccggaagatcatcttctggggcagagggaaaaggattcaagctggcaatgcagacactggacagaaccagactggaatgcgcggccatggcggcggggctgagtcagagagctattgacctgagtgtagactatgcaaagaccagggtgacattcggaaaaccgatagcgaagctgcaggcaatccagtttatgcttgcagatatggaaatcaggaaccaggcggccaggagccttgtatatcagtgcgctgcgatgattgacagcggggctgtggacggaaagatgaacgcggttgccaagacattctcatcggaagccgccatgcagaacacactcgatgcggtacagatattctccggatatggatattccagagaatatgaagtggaaaaactgatgcgtgacgccaagatatttatgatttttgagggtacaaaccagattcagagaacggtgattgcgggacatttaataaaataaaaacagtatgaacagagaggaggacgacccatggcaggcgttttagaggggctccgtgtaatcggccttacccgttatatcgcagggccatattgcggcggcccccctccctgtcttcctatagcgtcgtcgctttcggcaggctgaaaataaattccgttccaacgccttccgtactgaccacatcaatattttcaccgtgggcctgtataatttctttgacaatggccaggccgagtccggttcctttcttgtcttttccacgggatacatcgctcttataaaaacgctcccatatctttttgatattattctttgggataccaacaccggtatccttcaccgacacaaataccttctcatagcgtaccgaggtctggatatagatgaccgaatcctcccggctgaatttgatggcattgtcaatcagattgtagagaacctgctgaatcttgccgagatcagcgtagaccatctggatggaatcggagaaggtgagatcaaaagtgattttttttgcactgcatgtaccttcaaaggtagccgccgtatccttgacggtcctgttgatatcgaaattagtccggctcagatagcctttgctgtccagtgaattgagagtcagcatgccctgggtcagcttatttaagcgctcggtttcggagatgatgattcccaggtatttttggtacagctccggcgggattgtcccgtccaggattgcttccagataacctttgatggaggtcagagggagcggaaatcatgggagacattggcgatgaactttctctggtattcttccatatcattcagttcgctggacatatagttcagcgtgttagccagatagccgatctcatcatggctcgttatttttatgttgtgtgacagatttcccgccgcgtactcattggctgcataggttattttcttgagcgggaaatagacgattttcgtaaatatcagcaagataatcagggacagggcaaaaataatccccgatgtaatgtacacaatattcaggaatccgttctgttccgccttaataacactgataggaaggtgaatggtaatataaccgtaggtattcatgtttcccgtaatgggggaggagacagacaggacatcgctgtcaaacatcccgtaataccggccgatggtgtaaagccggtttccctgggcagtcggatcaaagccttccacggcagtgccggctgctttccggctgctgtcggcggtgataatcccgctgtggtccataatccagatcctggccttcatgtaggttgcgaccgcatccagttgaggataagcggttgccaggtccagatacttcccctcatataccttgctgcagttatcggcaatcatggttgcctcgtcatacagggcttccgccttctgctcaatcagatgttcataggtcagattagatgatacggttgctatcgtaacaaaacccaggaagccgaacagcagatagcccaggataaatttgtaataaagtgtatgtgtcatgacattcctccgtctcgttagtataagacgctgttcagggaataggtgaggaagtccaccagttctttgatcagtgttggttttggataattatttcttacggccagcatcatcggatagggaaacgcattgtctttaaatggtatggcccgcagttccggatatttgggaaccagattcgacgtattggagtcgatgcacaggccgcacaggccgtcttcactgcacagcttgtacatgtaaaccgtgtcgctggtacggcgaacgtcgggggtgaatccctccgcctggcaaagccgcaggaatttattgtacgcaaaatcattgatgcataaaataaatttttcatttctcaaatctttaatttccagctcctccttcgatgcgagaggattgcttttttccacaatcaaaagacgtctggtggagggcaggctgtaggtgatgaagccgtccgtattctcataatcggatatcacgacagcatccagcgtccccgctttcagacactttaggccctcgatatagccgtgctcatacggttcaatttccgtatgcgggtgcagctctttaaaatattcccagatcttttttgaaccgaagtaaatcagtcctcccgacaggccaagccgtatttttcccttgtggcgcgtggccgattcttccagcttcagatttagctggtcccattccgcaagaatcgggcggctgtcctccagaagctcctggccgaactgggtcggtatcatgcccttggggtccggtagaacagggcggcgcccagttccttctccagtaacgacagggatttgctgagagcctggtgggagataaaaagcacttccgaggcctttaaaaggctgccgctctcacatacctgcatgaaataacgtaactgtcgtatttccaataatctcaccttccagtatatgtgcacacgtatctatggtatcttcaccgtactgcctgttttggcaggatgaactgtgacctatattatacatcactttatttttggatgcaactttcagttgcattcctgtaaaaatttaaactgctatttttagaaaattcgctctgatacaataaatacatagaaaattaaaaggacggtggaagaagaatatgaagattattatatgtgtaaaacaggttcccgatacaacggaaattaaaattgatcctgtgacaaacacactgatacgcgccggtgtccccagcatcgtgaatccatatgacgcatatgccctggaaacggcactccgtttgaaggaacgctatggggcggaggtccttgttatttccatgggaccggagcaggccaaagaagcgttaaaggaatgtctggcggtaggagcggatcgggcatggctcatcagcgacagggcgttcggcggttccgacacgctggcgaccagctttgtactgtcccgggcagttgcgtggctgagcaaagagctgggagacgtcggactgatcctctgcggcaaacaggcgatagacggagatacggcccaggttggaccggagatggcggaacatctggacctcccccagattacctacgcatccgatgcagagctgtcggaggacggggttttagtgaaacgggagaatgacgacggttacgacatgattaaaacaaaacttccggcagtggtaacggtaacgaaaatctccggggagacaagactgccgtccatcaaagggaaaatgagggcgtccaaagccgaaatccccgtgcttaccgcccagacgcttgaaatccatgtggaaaaatgcggcctgaaaggatcaccgacgaaggttaaaaagacatttacgccggtcaggacaaagacgggaatcaaggtggaaggcaagacggctgcggaggcggcagcaggtatggccggatttttagatgagaaaaaattggtgtgacgattcgggagggaagtaacgtggaacaaaagcaggaatataagaatatctgggtatttattgagacagaagagggaaaagccaaaccggtcggattcgagcttttaactcccggccggctgctggcggacaaaataggggaaaagctggttgcggtgattcccggttacggcgtcagggaagcggcaagacaggcggcggcttatggagccgacgaagtgcttttcatagagggggaggagtaccgaaattacagaacggatgtgtatgcggattgcatgacagagctggtggagagacacaggcccctggtaatcctgatgggagccaccaataacggaagggacctgggaccgcgtcttgcatgcaggttaaagaccgggcttacggccgactgcacggcgctcgatattgacagcatgacaaaaaatgtggagtggacaagacctgcatttggcggaaacctgatggcgacaatcctctgcccggaacaccgtcctcagatgggaaccgtgagacccggggtatttaaaaagcccgtgccggacgaagacggcagcgcggcagaacagaagctgataggggaaagtgccgggataaagccggaacgtatcaggacggagatcgtggaacgaatcaaagaagtagtccagtcggttaacctggaagaagcggaaatcattgtatccggaggccgcggaatcggaaaggctgagaatttctcctatatccgtgaactggcggatgtcctgggcggggcggtcggttcttccagggcctgtgtggacgcggattggatcccccacgcgcatcaggttggacagacgggcaaaaccgtggctccaaagctctacatagcatgcgggatttcgggagcaatccagcacctggcaggaatgtcggggcagagacaatcgtggcaatcaacaaggacccggatgccccgattttcggggtggctgattacggtatcgtcggcgatctgctggaagtgattccggaattaatcagggagattaagaaggtcaaagagatttagaggtacaccgtattgcaggagggactcgctaactgataataagcccctgaccgcatcggctgagacgaaaggaaagaaaggataagagataatgagtgaattattatatgaaaagcagggaatgattgcaaaaatcatcatcaacagaccggaaaagagaaatgcattaaacagcgccgtaatccacggtatcgacgaggcattaaagcaggcggccgaggatccaaaagtacgcgtcgtcattctgggaggagccggtgaaaaagcgtttacggcaggctttgatttgaaggaggcaatggaacataacattacgggcgttgtggagcgcaggaaagacacctcggaggaaatcaaattcttcatgcggatgtggaacttcccaaaaccaattgtagcggcaatccagggctactgtatcggcggaggaatcaccctcgccatgctcagcgatatggtcatcgcttcggaagacgcctcatttggaaatcctgaaattattctgggatacgtgccggaatttccgatggaagtatggaaaatgccgtttaacaaggtaagggagttcttctacctgagcaagttctttacggcagcggagatgcgtgatatgaatgtggtaaatcaggtagttccctatgagaagctggaggagacggcgatggccgtggcaaaccggattgcccagataccgccggagagcgccaagataatcaaatattcgctgaacaaatgttatgagctgcagggctttagaagcactatcgattttgtgtccgaaatgttcaacctgggcagaatccacatgcagacaaccggggtagatgaattcagaagtgacattgcagagggcggactgaccacggctctgaaaaaacaatacggtaaataataacggaggctaaaccatggaacgattatggaaagtacaatatgctgacagactgattacggcgtcccgggcagctgctatgatacagaacggggacagcttctgctgcggagccagggagccggctggtatcctttcggagcttggaaaaaggaaggacctgacggatgccgtctactatgccccggaagaagattttccgcagcttctgcccaacatgggaagggggctgacagtttataccagctttatggacggaattaaccgggaatatatcaggaacggacggatgcagtttatcccctgcggcttttccggttttaccaaagtggcgcttgagaattttaagtgccgggccgcaatcacctgcgtgtcggctcccaacaaggacggtttcgtctccttcggtaattctgccgatatgatggcagatgtatgcagggccgtcccgcttgcgatagcggaaattaatgataagctcccctttgtatacggtgataatgtgatgcatgtttccgaatttgattacattgtggagggggacgggtatcctctgaatgtgggccggattgacgactccgacgaaaacagggagatttacaaggcaatcggcggttacctgtcggaactggtggaggatgaagccacgctggaggtgggaatcggaagactgaattcctctgccatgatgtatctggaaaatgcgcatgatctgggagtccacaccgaaatatacggtgatctgctgatgaaccttacaaaaaagggactggttacaaacaggaaaaaatcattgaatccgggagtttccgtctgcacccaggtggtcggttcccaggagctgtttgattatgtgaaagataacctggagatccgcctggactgctgcaaccatgtcctgacaccggcagtaattgcacaaaataataagatgacggccatcaataatgccgtacaggtagatcttctcgggcaggccaatgccgaattcctgaaaggcagccagcattccggcatgggcggaatcggagattttgcaacaggggccgtgagctgtccggacggtaaatcgatcatcgtgatagagtcggtgacaaagaatggaaagtattcgaaaatcgttccttactttgagccggggacgccggtatctctgagccgcacgatggtggaatacgtggtatcagaatacggaatcgcggttctggcaggaaaatccgtacaggagcgcgcccgggagctggtaaatattgcccacccggctttcagggaggaactggaatatcaggcaaaggagattggaattttaaattagagggggaagggagttacagatgagcagtttgagtgtagtattagtgattctgggaatttacatggtggtaatggttgggattggccttgcgggaagaaagtacggcgggagcatgaatgatttcatgacggccggaaagcagggaacgcttctgctggtgaccggttcctacatcggttcccatatcggaaacggtattgtggtaggaggcgccgaatacggcgctgtatatggaatcggggaatgtggttcggagtcggcgcggctttatcctacctattattttcggcagttatgtcgaggcgggtataccggggaaattgtgttacgctgtctgatatgctggaacagagatacggcgataaggttacgacgattctgatggcggtcctgaacggagcggccaatacggcggtaatggccggacaaatcatggccggaaagcggctctttgaatatatcggggtaaacccggtgcttggagccattatcacaacgctaattgtcattatctactcgtccatgtccggactctggggcgtaatgatgaccgatgtaatccagagtacggttatatttatcacagtgattgtcacggttatatttatcggaagtcagggcggctttcagcttatggctcagaatctgccggccgaaagcttccagatggttcccttcagcatggagacattcatcatgatgctgggtccgacggctctctatgggctggtatcgtcagccgcgttccagcgtaccgtctcctgtaaagaggaaaagacggcagtgatggctccggtcatcgcggcatgtatgattattccgtttgtaatcctgcctgtactgattggaatgtacggaaaggcattgtggccggatgcggcaaacggaacgattattttccaggtactgttcaaggcaatgcctcccgtcctggccggacttttaatcgcttccatctgtgctgcggttatgtctacctgtgacggcggtcttgtaaccatcacagccaatattgtcagcgatatctactataaacatataaatcctcaggcaagtgagaagacactggcaaaaatgacaacctggtcaacggtgattgtcggtttaattgcccttatcctgtcattgcagttttccagcattatctccctgctgtccatggcctatacttttatgacggctggaggattggtaatgatagcgggcggaatcctctggaagaaagggacgacccagggtgccattgccagcttcctgattggaattgcctgtgttattgtcaataaaatgggattacagatgccgatggcatccatcttcccgatattgccgtctttgattgcctatgtggcggtcagcctgatgacacagccgaaaaaaggctgagccattttgccggtgcgaaagaaaacaggggaaggataagactcatccaatcaccccacaaccccgtccggcggccgtcccggcggcgtcctcacctgcttaacaaaacctggaccaggaaatttcaaccacctaataatactcgacttatgtctcataatgtggtaaagttatatagtgtgacttgataccaaatgaatgattggaatgtatagttatgggacagtatattgtattagacttggaatggaatcagagtcctcttgggaaagacggctccatggatcggctgccgtttgaaattatagaaatcggcgcggtcaagctgaatgctagtttacaaatcatatcggaattccgccgtctgatccggcccagagtataccggcagatgcactttaaaatttctgaagtaacccacatgtcgatggatgaactgaatatggaaggcgaggagttcggcaaggccatggaagagtttctggcctggtgcggggacgactataaattctgtacctggggttccatggatttgacggagcttcagaggaatatggtgtaccatggcctggatattcctttccgaatgccgctgctgtattacgatcttcagaaaatttacggactgattcggggagataagcagaaggattcgctggatacggttgtggaggagctggggattgcggaagacaggccgtttcaccgggcgctcgatgatgcgtattataccgggcgtatcatggccgagatggatttttacagcatggtggagtatgtctcagtggattattacaggccgccggagacagaggaagatgagatttacctggaatttccgggatatgcgaagttcgtatccaggatgtatgatacaaaagaaagaatacttgaggagcgcagagtgacggacatggtctgctacaaatgccgccgtacactaaggaaaaagattagatggttttcctcaaaccagaagttctatttttgccttgcttattgcccggaacacggttatatgaagggcaaaatccgcattaaaaaatcggaggacggttccgtctttgccgttaagacgacaaagctgataggagaagacggtgcggctctgattacgaaaaagaaggaagaagcaaaaaagaagcgggcagatcgcaacaaagcgaagcgggcattcagaaataattcggataaatctgtatcagaagaatgcggaacactttaaaaagatagtgggagaatatcggaaacggtattctcccatttgtattgaaggcggtgacctgcgcggggagcatgccggttatcgctatagattttcaggcgcgccctggcgctggctgaaactgccggcaatccgtaaaaactcgtcggtcatggcttcgggagtttccctcatgccgccctcaagccagcagagcagcatattataaaatgcgccggcaaaataataaagctcatattttgcaatggaattggccggcatatcgccgtaggcatcaatctcacagtctgtgataacatccagcagagtggtggaaatctttgcatggtgaaacgccagtacgagatcggcatgttcacggtagaaccggaacttatacagtatcatctccctgctgtgcggactctcagttaaggccggcattttttcatgatattcaagactcagtttatggattccatagccgataatttcttccaccgatttaaagttccggtagaaagaagcccgggcaacaccggatttttcaattaactctgtaactttaacctttgaccagtctttttcgcctgcaaaatcaaccagtgccgagaataaacggtcttttaccagttgattggctatttttcttttatccatgatgatacattttcccatattttgtctcaggttgacgcattgacatcaacgatccatgtgatacaatatgtatcatataaagatttctttaatctgtcaagaggaggagcatatggttttatattttagtggtacggggaacagccagctagtggcagtccggatagcagaaatgacaggcgataaggcagtatcgattaaccgatatatgaagaagggagaaaaagcggtgttccgttcggaacgcccgctggtatttgttgctcctgtatattcctggcgtctgccaagggtggtggagcaatggattatggagaatgattttgaaggcagccgcgatgcatattttatattgacctgcggcggcagcggaggaaatgccgctgtttatgcggaaaaactctgccgccgaaaagggctgcgttatcgcggtctgtgttcggtgcttatgccggaaaattatctggctctgtttcccaccccaggtgaatccgaaagccgggaaattattgaaaaagccggtccggtcataaccgatcttgcaaggcagattcaatcaggagagacattgaccgcgcagccggtttcccttgtcggcaagattgaaagcggccccgtcaatccgctgttttacagactttttgtaaaagataaaggttttactgtttctgataaatgtatctcctgcggaaaatgcgccctgcgatgtccgctgaacaacatatccattgaaggcggaaaacccgtatggaagggccgctgcacccactgcatggcctgtatcgggggatgtcccacggaggcaatcgaatacaaggctaagtccagcgggcagcgccgccattatatcatggacgattctctttgctggaagaatgaatgtccagaaacgctgtagttctccatccggccagaaatctagtaacgctattttctttttcgtcctttaccggcgggagctttccgttcccgctcaggggaggaaattctcttctgctgcatcatcaggtcaaaatcagcttccgaaattcccgtttcctttaaccgctcggctctgcgccggcgccgctccagtaaagccgcctcttcctgcgccctgcgccgtttgaagaccaatacggcaaatgtcccggaaccgccggcaacaacgacgacggcgagaatcttccagaacagcgacggtattttgagggaaatactgaatttattgccgtcctgttttgacggctccgattcgggcggctgtgctgctccatccgcgtttcgcgctgacggtcctggggccggttctttgtcctccggatgtaaaatatccggattttcagcagcgggagccaacgctgacggctgcacttcaaggagcgcctggggcagagccaaaccggcatcggagacagcatcctttaatgtaaggtaagcgtgtccaaccgttctttctcccagcaagtaatttacgcaggcgattgccccggacggagctccggccggcagtgtgtaatcaagagatacggttgtttcggaaaagtccgctgtaaccggaagaataattttactgtccggatcaatggtcagcacctgcttttcagaggtgggcaggccggatattttcaaatcgtcgccaatggtagaaaatgttttatcataatcggcgattcttaccgctttaaaattattaaatccaaagttcagcaatgcctttgtgtcgctgtactgggtcccggagctgtgcaggatgacggtaacaaacttcgtatctccctgctgtgcgccaatgaccagcgtattgagagcaatggaggtatagccggtcttgcctccgattacatcgggacggtactgatccggccagtttttcttgatcattttgttgccgggggaaattccctggccttccgggttcttcttattgggaggcagctcatagtatgtagttgccactatttttgaaaaatcctcattttcaaatgccgcctttgtaatcagcgccatgtcgtaagcgctgacataatggttttcatcattcagtccgctcgggtttgaaaaatgggaatcctgacagccgagctcggccgccttttcattcatcagcacggcaaattcttccgttgtgccggaaatgtgttcagccagggcattagccgcttcattggcagactttaaaagcagggcgtaaagacagtcttttacgctggcggtatctccggtatcataaccggcgctgctgctgttggactccacattgtacaccgcattctgggaaaaggtcaccgtctcatccatcgaacagcgttccagcacaatcaatgcggtcaggaccttggtgatactggccggggcgtacgtggagtggatattctttccatatattacggcgcctgagttggcatccataataatacctgcatcggactcaatggacacgttgtccggccagtcggctgaagccagcacggtggacggacagagccaggccatcaaaagcagggataataacatgcttataatttttcgtttcattctataatcaaatcctgttcttgttaataatcagcgggtttcggtcactgtatatattaatatttgtaatataaacgtaattactatttaacagtatataggaatccgaatttcatgtaaagaaaaattgtccacatgtggaaaagtctgtaaattccatgttattgtttacaccatgcataaagaggcatgctgtgaaccaatgtcacttagttaagcaggtgaggacgccgccgtaggccagcggacggggtggtgggattgtccttacggctgtttttccggcgtccggcggataaaaaaaatacatatggcgaacaacaggatggttgccgctgcaaaagtgacaccaattctggcagcggtatccacaaaaaatggttccgggacaatgtttatcaacaaatcggttgatggatccagaatccacaggtcattggtaaagaatattttgtggaaaagtataaaatatttcgtgaagtctgtggatattatggctgcaagggcagcagttaatgcaaaaaacagcgcagtaccgatacagagcatccgaggcagcaggcgttttatatcagctttcgtccgccaaagcagtgcgatgctgagaaggataatcactgcacaaatcctgcggatggcgatcgcagctaaaaagagatgctgcacatcgaccatatgggcgatctcccgttcattgaaaaactcccgctgaacgcctcccacagttgtggggacatgaagatccgccctcttaccacggagaaaggccatcatctcctgcgtcacgtccagaagatcctccatttccatatttacatcctctgcaacaccatatttttcatactctttttcataatagcccggggtccagtatgcgacagcctctaccgatgtgatcagaaaaataatcatcaggcagaatgcgcacaggataccgagaaaatgctggaaatatttcatcacttacctggcagaaacaccggcttttacggaatatttctgcggctcctttctcagataaacagccgtcctttaatcaagacggcaacaatcgctttgttccataatgtaaagtaccaatagattatagcagaaagccaatgcggggaaaaggtcagtcgggcggaaaaattgtgaatttttttacagccgtccccggaagaccttgcaaagaaccgcaattctcctgtatactaacagcaaaaggcagaaattcaggaggatttatgataaaagcagttatatttgatatggacggggttattatagacagcgagatggagtacttaaaatatatctatgagttcgctaaggaaaagaatccggacatcctgatcgaggatctgtacggaacggttggaacgacaaaacgggactgctggattgtggtggagaaggcggtggataacggtgaatcctgggaggagttaagacagcagtaccgcagccgctgggacgaggtgtttgagttagtggattatcaggccattttccgcccggaggttcttacggtaatggactggatacgggagagaggatttaaactggctgttgcatcctccaccaacatcgagcaggtcacaaagatattgacaatgaaccatgtggcagagcgtttggaactgatggtaagcggaggaatgttcaaaaggagcaaaccggatccggaaatctatttttatacggcagagaaactgggggtaaagccggaggaatgcctggtgatcgaagactccaccgtggggattaccgcggcccacagcgccggaatgcatgtggcggctctgatagaccgccggtttaactttgacaggagtcttgctgactttgaactgggaagcctgaatgacatacctgggctggttgaaaaaataagcggtaatgcagtccggcgtgccgtttatccagattggctgcaaaatatctgattgacaacggccacagccggattttgtgcctgaatggaccgtcttacatatccgggcacatgaggaggcagggctgcccgtttttccggagctgattcgggaagtaccggtagcggaaagcaatataccctatattctgaaacagatgaaacaggaggacgcgggatttaccgcaatctttgcattcagcgacagcatggcctgaccgtatcagccgtttttttccggtgcgaggagactgacggccgcatataccgccgcgcttatcagaatgctggaaatactggcgtaaggcaggcgtatcagttccagcgaggcggccagcgaaactgccatgcctgcaaaggcgctgtacagcgctccgcggctggtgccttttttccagatgacgccgcccaggaagggaacgagacagccggaggccatcaggctgtatcccatggagagtacccggataatgtcgttcattttcagcgccagaagtattccgatgcagcagactgccatatcggccagaagcatcaggcgccggcaagttctgctgtctgctccgggatttaccataccaaggtagatatcatggacaaagtttgcggccacggcaatgtaagcgctgttgcaggaggagaccacggcgcagattacggccgccaggatcacggcggccacggcggtgggaaggcgcgtgagcagcagagaggaaaatacattttcagcgggaataccgggaaacaaagcgcgcccgtacatgcccagcaggggcggaatgaatgcgaccgggatcaatgtcagtccggccagaagataaccgcctctggccgatttgagggatttggcagaggcggcgctctggaatgagatctggttcactgagcttgccaaaacgatgggagcagtcatagagactaaaaattcggcgccaaagggcgctagatgaaagctggaagcaggcagagcggctgccagtaccccaggaccgggagcggacatcatcagaaacagggctgtggacattccgataaagataatgacgctctggatggaggagactgccatagacccccataaaccagcggcgtttgagtataccagcgcgataaccgcagtcaggacgacaccccactgggccggaaggcccaatgtcaggaatatggcccttccggccagaagctgcccggccagcagagaaacgctgcaggagatacttgcggcagtataaatcatacgggtcgcatgaccgctgtaacggcgggcaaaataatcggccggggagacatagtgatgggtgcggatgaaacggcacagggccgcagtgataaagtaggaaagcccgcagccgataccataccaggcgcccgcaatgccgtagcgggcgccgtattccgcaccgccgatgacaaatccgctgccgatttggccgccgatggcgctgcctgccagcaaaaacagggaagtttgaccgggggccgcgatagtgtcctgaaagctgcgtatccggcggcttgctcgcctgctgatgagcagcatcgcagttccataggacagcaggattaaaataacaatggacggggtggtcataaggtgcctcactttcggttgaataggtgaatttgggtggagtagaatgagggtgctgcaaaattaaagcagcaccctcggtattagttcgttcgccccgcaggggcgcctgcaaaattgcgttttctatgcggcctgcgcctctgtattcttgctgcaaagacttacgataatgtaagcgatggcagacggaatgacagggaagattccggccggtatgatactgccaaacgggaatacgacaccggtccaactgataagtacggtggcaacgccaacgatggaagcggcaacggcgccggctgcagtgcctcttttccaggccaaaccgccgacaaacggaacgaaacaagcggcagccaggaaggagtatacggagttcagaagccccaggatgctgctggcggacagagccagagcggttgaggtagccatgaagccgatattgactcccaatgtaattttctttaactgggcctctgttgggtttttcttcagcgtgccctgccagatatcgcgagtcaatacagttgacatcgtgatcaggccgcagtcgatggtggacatgcaggcggccagaacagcggcgataatcagcgcgcagacaatggcgggaagttccatcaggatgacatcgaagaaagcgctatttccggtggcgccgtatttaaaggaaccgtaagagccgataaaggcgggcatcagagccagcggaatcataacaaggcaggaaagatagcaggcaatacgggaaatcttcgcgctctttgcggagttaacacgctgataagtcggctggtcggttacgatacctaaaagcagaggcagcatcatgcctgcaaaaccggctgcggacagaccgctgaaatccagagaggagcttgccaggttaccggcctgaatggctgcgctcatctcgcctacagcgcccttgctgaacaggacaatcgtggtggcaacgaggccgaccaggataacgcctgtctggataacggaggtggcaaaagcgccccacaatccggaaagctgagaatacagcagaaccactacggcaatagagatagcgcccacgttgcccggcagcccaagcgcttcaaaaagggccttgcctgccataatctgtccggcaattaagccgatggaggaaatagcggtactcaaatcatagatagtgcctggaatttcattgtgataacgtttacgggtatagtctgtcatagacatatagccgttgttataaataaagttattcagaaaaagagctaccacgactgtggacagcgcacaggcaataccgtaggcggcgcctgcaagtccgctgacagcgccctctgcagcgcctccgaccacgaaaccgttgccgatctggccgccgattgcgcctcccatcagaagcagcactccggcggagcggcccatgcttaaatatccttcaaagttgctggccttgctgcggcccatccatccaatcacgaccattgctgcaaaataaagtattaatacaattacgatagttggaatcattgcgttcatatatcatattcctttctgccgtgttacggtgtgaacacggtctccagattattagggatatgtaacagttcatacaacatgaaatgttacaggatatatcttatctattcaatataagagcctgcatcatagccctcgtgaatcgccagacggacattccgtgcctgcctgcagtcgccgatcttccagaattccggggcacaggagcggaaagactccgcttcatccagcttcggagccaggccagcggcaattatgaccgtatcggccggaagcttgatttctttcccgtcctgctctgccgtaacgccatccggaagaatgccggtacatcgcatgccggtgcgggccgtaatgccaagccgttccatttccagcagaactgcttcgtggtgaagaaaaggtgcatcacggcacagctcaggtttcatctcaaggacggtcactttcttacccagttcacccagaaggatactttcctcacatccaaccaggcctccgcccagaatgactacattctgtccaatctcttccatatgctcatgcatcccgactgcggaaactgcaatttcaaggtccacgcccggcacaggaggcacgatgggatcggcgccgatggcacagacgatggcgtcgggcctcaggctccttgccagttccggcgtcataccggtattcaacatgacggttatcttacgccgttccactctccggattaatacctgcataagctgatccagctttgatttgaacgaaacgtgtccggcaaaacggatagctcctcccagccggccggatttttccgccaggataacctggtgtccccggtcggccagtgtgatggccgcctccataccggcaggaccgccaccgatgacaagcacctttttaggaatgagggcaggacagacgtccttttcggtatattcgcgcccggctaccggattgacggagcatcgtgtcaggcgggaggaatatttgacataggggacaaaggactcactgatacagtggttgcaccgtatgcagggagtgacatcatcggcccggccgccgcggagcttgtcgggcatctgggcatcggcaataatggagcggcccacggcgatgatatccgctttgccttcggccagcacctgttccatcagctccggttcatccagtccgcccacaacggccaccggtgttttaacggcctttttaatagcggccgcaaattccacattgacgccaaatgggtggaacatgctcggaaccatatgctgattggtttccgggtaatggaacgtaccggcagtcacatgaatcagatcgacttttccatccagtaactttgcaaattcaacctgatcatcaatggtcagcccgccttctaccagttcactgccgcttaaccggaactcgatcaggagttcggggcagcgcctgcggatggcatccaccaccatgagggagattcgcgcccggttttccagagagccgccaaatttgtcggtccggtgattgttcagcggggacaggaattcatgaagcagccagccgtggccgccatggatcataaccatctccacaccgcccagccaggccatctccgccgcattggcaaaacaattcactatgtagtctatcgttttttcatccagcgcggtgtaatcttttcccagatgcccgggggcgtcgctgggcgcccagattggtccgtcgtaatattccggattcgcccggcctccgggatgaagaatctcgattgcgggaatggcattgtggcgcctgatggcgtcagttgccagaatcagggaaggcataacttccggatcatccagagccaggcacaggagatgggatattcctgttttcaggtcaattcgggcctctcccatattgacaatggcggcgcctcctttggcctttcgttcaaatatggcaatgttatccggggtaaagtgagcctggggggtcagattggccaccgacacaggagccgcttcaatcctgttttttaagacggtacggcccagccggagcggctgaaacagatgtgcatacggatgcatggcagtcctccttctcatgtcccattctggtttgagacatattgaataatttgattgcggcacagaaaatagcttgttgatattataatttgatgttttgaaaaagtaattaaataattctgattagtgatttaaaaattctgatattatctgccgctgattacgggggtacttttcacacggtaatgtcccgtgcggcaattgggcgcgttactgttcacaaaatggacggcattgcggtcttgtgtttaccgcctgcatttgctaaaatttaaacaaagaagagttgggtagggggaggtacaagaggatggataaatcgaaaaagatacctgaatcactggattattggaaaaagtatattactctgcatcacgtattggcttgtgaactgtcttacagcttaatctataacaatattcgcccggataaggtcggagatgccctggccaccgtagggcttgacacacttcccaaccggtttttgctgcttcaggtggacgattattacaattacagcagcaagatgattattacccaggagttttttcagaaaaccatcctgattaacctgatgcgggaatgtatggacagcatgggactgaagggatttatggccaatctggtgagtctggacaagataatctgctttttgtgctgtccggaatgggaggggccggatatcaacagacgactgatggaggttgcggagtgctttaaaaaatgtgtccggacaaaaagctcttacacgatttccgtttgtatcagccagcagtgcagcaggctggggcagttttccctgatgtatccaagaatggatctggcgctgagcaaaagctacttctcgggaaaggaattcaatatccttttggaggaaatggagccggatgcggaggaggtccgggaggaggccgatataaataaattttatcctgagctgctggccgcttttgccagaggcaaccgggaccagcttgaggaagtgcttcagggaattgtacgggcacttctggagggacggacgcgcccgcagaaggcgaagatggaaatgatccggctgcttcagcggattgaggattactgtgtgcgctgcggcgtgccggagagctggattcagcggcgcagcgacgcagccatgaccaggatcctgtcatgcggctttgtgggggatacgaggatctgttttctggagttttatgacgaggtgacccaggcattgggagaacacagtgcagacgaggagtattcctttaaaattcccgttaccgagtatattgatacccactatatggagaatatcaggttaggcagcctggcagatatcatgggattcagcgaggggcatttcgcccgcatattccgtaaggaatttggcatgacttttgtccagtatctcacggaatgccggatccagcgcagcaaggaactgctggccgatacctcggtcccgattgagcagatcgcctatagagtcgggctgaacagctacagctatttctgcacctgttttaagcgtacctgcggtatttcccccggggccttccgggccggagccgtccggagcgtggaggcggattccttaaatattccggagaagaaaagttgaaattttaaaatataatgtttaaatattgaataacatttggaacagcaaactgttaggatgtacatattggcacagaaaaaaaagcgtattctggtaaaaatacacaaactgtccggcggcgcggtgttgttccgcccccgggttatcagcaatcagaatctggctgaaagctgaaaacattttagagaataggaggcctatatgtcccattatccacatttgtttgcgcctatccgtgtgcgcaacgtttacatcaagaaccgtattgagtctgcacccatgtccgccagcggcgacgttccattctatacccgagaggcgtatgaaatgtatgataccattgccaggggcggcgccggtattgtaacgctgggtgaggcaggcgtgcatagcctgaccgatcatgcccatccaaccatgccgcatctggatgacgaaaatcttcttccgaccctgattcaaaccgttgacaccgtacataagtggggagcgctggcttccatcgaactgacccactccggctgccgcgcaaaaggcgcttttctggcggagggcggttatgtcatcggacccagcccaatggaggcgaatctttacggagacaaagtcatcgaaatggacgaggacatgatgaacatgatagcagatgcctatgcgcaggctgcctacatggccgaatttgcaggctgtgatattgtaaacatccatggcggccatggatggctgatcagccagttcctgtccgacctgaataaccaccgcactgataagtacggcggctgtatagaaaataaagcgcggttcccgcttatgattgtggaccgcatccgccagagatgcccgaatctgattatcgagttccgtttaagcggtgaggaggataccgagggaggcatcccgattgaagaaacggtggaatttgccaaactgctggatggaaaggtggatattattcatgtttccgcggcgaccttccatgatacgggaaccgcatcccgcatgttcccgtccgtgttctaccccaggggctgcaatgtagaaaacgctgcgaaaattaaggctgtcgtaaaggaatccctggtttccgttgtcggaggcattaatgatccggattatatggagtctgtgctggtggatggtaaagccgactttgtcgtggtcggccggcagtttatagcggatcccgactggcccaagaaggcccgtatgggaaaagccgatgaaatcagtaaatgcatacgctgccagacatgtatcagcgccggctttattcctcatgttccgttttcatccggtgtgctccgctgtaccgtgaatccggcctggggacgtgaatatgagaatacccgcaaagaagagaaaccggaccgtgtaaagaaagtactggtagcaggcggaggcccgggcggcatggaagcggcaattaccgctgcgcgccgcggacataacgtgattctgtgtgagaagagcgatcacctggctgccaacctggactactcaaaacagctgtccttcaaaaaggatattgtagagttcctcaaatccatgatgctcagggtacagcgtaccccaaatctggaacttcgtctgaatacggaagttaccgaggagctgattctggcagagaagccggatgtactgattgccgcctgcggagctgagccggtgaatccgcccataccagggcttgaccggcccatcgtgcatcacatcaccgatctgtataaaaaacacatttccgtcggtaagaaggtggtaattatcggaggcggcctcgccggaagcgaggaaggcctcggccttgcctgggaaggccacgacgtaaccatcgtggagatgagggacgggctggcaaaagatgcgccttatattcactggcgccatctgctcacaaagctgaacgagtccgttcattcctattgctctgctaaggtattgtcggtggaggagaatggggtaaaaattgtggatgcagacggtacggaactgcttctggaagctgacaccgttctggtggcagcaggcatgcgcggcatttctgcacagctggatagctggcatgagctggccggggaggttatatttgtcggtgactgccgtaaggcgtccaagattcaggaggcaatgcgcacaggatattgcgccggcctgacgatataattatatagtggaaatgggcaggactttgactcgattcaaagttctgccttttttatgtctaaatacggatcaaaggagcttattacgttttacaaagtatttacaatttttatattgacagttgagcatgtgttcaactataatatgtttgacagttgaatatgtactcaactgtatgagagatattttacggatgattttgtgagatataactcttatctattgatactttataatacgggaaacccatgataaatttaagaaaggtataggtaatcaaatggaatccaataaaaagcgtttaatccgtattgctctgggcgcagttcttttcactgccgcagtcctggtgaatacaaatagttccataatcaaagcggtcctttttctggcgccttttatcatcataggcggagatgtcattctgaaagcgtttaaaaatatcgtccgcggccggatatttgatgaaaattttttgatgagcattgcaaccgtcggcgcatttttaatcggggaatatccggaaggcgtcgctgtcatgctgttttaccaggtaggggaattatttcaaagctatgctgtggataagtcgcgtaaatccattgccggtctcatggatatccgccccgactatgcgaatatccgaaaaaacggacagattgagacggttgcaccggataaggttgctgtcggcgacataatcatcgttcgggccggggaaaaggttcctcttgacggggttatcctggaagggaactccctgatggataccaaggctctgactggagaatcggttccacgggaagcggtcacgggggatacgattttgagcggttttattaatatgagcggactgctgactgtacgggtgacgaaggaattcggcgaatccaccgtcagcaggatactcgatttagtggaaaatgcaagcagtaagaaatccaattctgaaaacttcataaccaaatttgcccgctattatacaccggttgtagtcgtcgttgccatattgatggcggtgattcctcctctcgttattccgggaacctctttttctgtttggatataccgcgctctgaccttcctggttatatcctgtccgtgtgcgcttgtcatttcagtgcctatgagttttttcggcgggattggagccgcttccctgagcggcgttctggttaagggcggcaattatcttgaagcgctggcacagacggaaaccatagtttttgacaagacaggaaccctgactaaaggtatatttaaggtacagtccattgaaccaaaagggatttccaaagaagaactgctgcgtttgacagcttatgcggaaagctattccagccaccccatttctctttctttaaaagcggcttatgggaaaaagattgacagcagtcttgttacagaggttgaagagattgccggacacggtgtcacggctgttgtggacaatcacaaaatcgccgtcggcagcaataaaatggttctccggtacagtctgcccccggcagacaccggtgatgtggcgggcaccattgtccatgtgatagtagacggagaataccgcggctttatcgttatcgcggatgaaatcaaggaggacgcattcaacgctgtggaggctctcagaaatttacaggtgaaggaaaccgtaatgcttacgggggacaccgatgccatcggcaggtcggtagcagcccggcttaaacttgacaaggtttacacggagcttcttcccggcgataaagtggagaaggtagaggcaatgatgcaaaacaaatcagccaaaggaaagctggttttcgtaggtgacgggattaatgatgcgcctgtgctggcgcgcgccgaccttggtattgccatgggcggcctggggtcagatgccgccattgaagccgcggatattgttatcatgacggatgaaccatccaaaatagctacagccataaaaatatcaaaaaaaacgctgacaattgtccgccagaatattatactgtctctggcagtaaaatttggcgtcctgattttaggagccgccggattagccactatgtgggccgcagtgtttgccgatgtaggagtgtctgtaattgctgttctgaatgctgcacgcattctcagcaagaaacaatatatgtgagtaaattgtaataacaggaggaggttaccatggaaatgaaagacagcggctgtcatattgtgaatgaaaaattggtggaggaagctaaagcaggtatatccaacagggctgaattagattacctttcagagctttttaaactattaagcgaccctacccgtatgaaactggttttggccttatcctgcggggagatgtgtgtctgcgatttgggcgcagctcttggcatgacaaagtctgcaatttcacatcagttgaaaaccatgaagcagtgcagtgtggttaagtcacgcagggaagggaaaaatgttttttacagtcttcacgaccagcatatgacagatattatagcccttgcggcatgccatgccggccatgtccgaccggtttcagaggaaggctgatgtgatttatattcccggaaaagaaaacccggctaagggcatatgcttataagcagatgcttcttagccggattttcaatatcgggcggcgtctccggttttattccttatacggcgtaatatcatggcaggagagcagacaggcgtcctgcgactcccagcggatataggaggcatctgccatggaccagaccttgaggacaggattgtaaacttccattgtctggttaatgttaatccggatatcgcgcacagggcagattctgcagggagtattcctgtcaaagaaagctttgtaacacggcattcccagacgggccgacggagcaatggcgtaggtcttggcattgatatatttcagcgcataggtgtcgggatcgattacataaatccaggaattctggttgtccagcaccatttggagattttcggccatggccaccgcgcggttctgtgcccgcattttcagcaggaaggtggataatagctctgaaataaaaatcagcgcatcaatctgagcctgtgtccagattcgtttgtctttacagtcgtcaaaccccacataaccggtaaatctgccgtcattgcgtatcgcacactgcagcagggaatggattccctgtttatgaaacatattgtacagtttgggcggaagcgtggcgacatcagggcagaaaaagacgccgttctcgttaaagagatcgcagtaacggcagtttccgtccatgaatttactgtagtctacattctgtaaattagcaatttcagatttaattcccttattacaccattcaaaggtattattgcagaaggtgccgtcattcgtgtcctcgataatatagacacggctgacattacatttttgccctaccatctccaggatggaattgatggccgcctcctgatttctggcctcataaagcacttgaaatgcctgttggatgatgctgtatgttaccaggttcagtgagtcgtcagactcaattcgggtgccggccgccggaagctgatctgaattccggataaatccgccggacataacggtcctgtcgtacagtgcgtattgatccttgccctgctgtttggcatggtagagcgcctgatcgcatgcctggaaaagtgtctggtaatcggagccgtcgtcagggcagcaggagataccgatgctgcatgacaaatggtaatcctgcaattcatccttcagtacattgtggaacgcgtcgacgactctctgggcgcgtgcgtgcaaaacctggtcatcggcaaagctgcacatatataccaggaattcatcaccgccgatcctgactatgacgtccccggtacggaacaaacgctggagctgtgaggaaatttcagtcagcacggcatcaccgaacatgtggccgtaggaatcattaatctgtttgaaattatcgagatcaataatcatcattgacgcctgctccgagcctccccgttcctccagaagcttctggattttatggcgtcccgtacttttattatacagcccggtgagggcatcgcgttccgcttttgcggtcagctcctgggtttttcgcttctcggcgtcaatatccagtataaccccgacagctttgattggatttctgttccggtcaaactgcgtggtggcacgtacccggcaccagacataatgaccggctgaatttgctatcctgatttcaagctcacggtacggaaccccatttcgtatactctccatcagggctaagaaggatggtacatcttctggaaaaagatgggaggcattcggaatccggctaaggctgccttcggaatccggcttatacccaaacttcttctcccagttggaggaatatgaaatcatatcgcttccgatatcccattcaaaaataatatcatttgtctgatccagaatgatctggtggcgttccattgtcagcctcaaatcctcctgggcctgctttacctgggtcatatctgtgagaacgcaattgatgtactccttgccgtccccggaaacggacaactggcatttatcgagaatccagattatgcgtccgtccctggcaaatatcctgtattccagttcaatggggattccaagcagaagcttctcgtggaaccgggcaattacctcggccctgtcgtccgggtgtattatattgaggtaatgaccctgcagctcatcatttaaatcggtacggctgtaacctgaaaggttgaaaaacccctgattggcatcaataatagtaaaccagcggtcatttacacattgcaggatgcccaccatcaggttctgtatttccgttattcccgaggaacgttcggactgtgcggcctgaattggcggactttcgagccttttccatacgatgagaatacggtgggaatgcggtgcctgaatattgatacgcagagtcacagcttcataccagagataatcaccggtggccctgtggagaacacggtatttgagcgtgtgcttcagaaggccgttttcaacgaaatcatggatataattatcactggaaccggccacgatgccctggtcctcggtatgtaccgatttttcggtgaaatttttaagggcttctttataattgccgccagagcgcagcggttcaaaatcttcgctggctatataaacaagatggtagatacctgtgcttaaatccacttccattacggtggaatcagcgcagcgcagcatagccgcatatttcatctggccatattgctgtgtatcctgttcttccgtctgtctgaattgtggcagcgcaggcgcttttcttaagtcggcttttggggaatgtccgtcggcatagctgtgggtcagacggacaaattcttcgcgggagcttttaaagcattccagcagtttgggcgaaaacacaccgcattctccgttcagaatcatcgtgtacgccttagccggtgaaaaagcctttttgtatacgcggtcggtggtaagtgcatcatatgcgtcggcgattcccactgcctgcgcacagatggggatactgtctcccttcagcccgtccggataccccttaccgtcccagcgttcgtggtgataccggcaaatccggtaggcatagcgcagatactctttatcatccatccgatcaaggcccgaaagaatttcacagcccttttccgaatgggttttcataattgaaaattcttcggcggtgagcggccccggtttatttaaaatagcatcgggaatcgatattttaccaatgtcatgcagggcggatgcgcttgcaataatattaatggtgcgttcgcttaaatcatattccggataactgtgcatgatattttcaagcaatatctttgtgaacatacggattctcaggatatgctggccggattccacgctcctgtgttcaacgacggaggagagggcgtccatcagtacatcccgggactcgcgcagcttaacggactggagctccaccagctcctccaaatgctctctgtgcagattcagttcaatggcattttgcactcttcttttaaccacatgcggttcgaagggcttcataacaatatcggaagcgccgagatcaaaagcccggacctcactctcgatggtatcttctgaggtgatgataataaccgggatgtttttaagcagcctggtccggttcatatccgacataacttcataaccgtttttcaccggcatgataatatccagcagcagggcggcgatggagtctttatactgattgagcagaagcagggcctgttcgccgttttctgcctcaagaatattataattattttcaaataaggcacgaagaatagcgcggtttacttctacatcgtccactactaacagggtattacggttcatatgaagtcactcctctttagtttcgccgccgtttaattaccttcagacgggtaaattcctcacggtctttttcttccagggaatttgtgatatcccggaccaggccgctgtaggatggaattgtaatgtttttcagtgcattggcccgtttctgggtctttttgatactggaagcaaggcggtacgcggaattctccaccatagacaggcggatggtcagctctttaacccggtcgaacgcggcccgggcctgatccagagattctttagtgctgtaaaaagcgtaagtgggaacctcctcctgctttttatggaagcgcaccagaggtatctccgttcccataatgctccgggctttgatttcaatcgaatcctccaccgggatcgattcaccggcctcctggacatagctgatgcccagctcgatatttgccttctggagcgcccgataggcggtctggaaggtgacatcgatttccgactggatgtctttggcctgatcgataagagccatcagttcacggatcaggatatttcgttttttatccatcagctcgtaaccctggctggccagggccagggagtttttcgccagtatcagattcccttttgtaggaaaagtatttggattcatttagattcatcccctcctccgggcggtcgttcttctgttttaatcggcggccggtttataatactgatccagcacctttgtgtctatacgatccagctctgtcctgggcagcatgccaagaagctcccagccgatatctaaggtcttaaggatactgcggttctcgtggggatcctggccgatgaaacgtgtctcaaattcttttccgaatttcagatataatttatctatcggtgacaattcatcctcgccgattaccgacgccagcgctctggcatcgccgactttggcgtagcaggaaaaaagctggtttgccacatcctgatggtcggctctggtaaaaccgtcgccaatgccgtccttcatcagtctagaaagcgatggaaggacacttaccggggataaatggactggccctgcaggccccggtctaatacgatctggccctcggtgatatatccggtcagatcgggaatcggatgcgtgatatcgtcgttcggcatcgtcagaatcggaatctgggtcacggacccgtttatgccggctacgattccggcgcgttcatagatggcggccaattcactgtacaggtatcccgggtaaccttttctggaaggaatctcgcccttggaggaggagacctcacgcatggcctccgcaaaggaagtcatatcggtcaggataaccaaaatgtgcatatgcttttcaaacgccagatactctgcagttgtcagtgcaatcttcggagtaatgagacgctccataacaggatcatttgccaggttgatgaaggtgacaacgtgatcggaaacaccgctctcctcgaatgtccggcggaaataatccccgacctcgtattttacacccattgccgcaaatacaatggcaaacttttcggaagaatcatctcccagggatgcctgctgtacgatctgggcagcaagctgatcgtggggaagtccgttgccggagaaaatcggcagtttctgtccgcggatcagagtagtcagtccgtcgatagccgagataccggtccgtatatagtttctgggatattcccgtgaaactggattcaacggttttccgttgacgtccagccggacgtttccgggtaccggacccagaccgtcgataggctggccgataccgttgaaggtccgcccgagcatctcctcggagacaacgatctccatcggatgtccggtcagcctggtgtgggtattgcgaagcgccatattctcggtcccctcaaagacctggataatggccttttcaccgtaaagttcgattatctttcccagcttgcgttcctggccgccgacgttcatttccacgatctcatcgtaggcggcattctcgacgccgtccagtaccaccagagggccgttaatggaactgagtcccaaatattcaattgccatgatataagtccctccttaagcgttccgttccacgacaccgtcatagaaccggtcaacagcatcccggtattcatcgaagagctcggggcggttattgggaacgtcgtatttgatagatataattttctcaaaaatatcgtcctgttttaaaacggacatcggcatgcccatcccaatcagtgcgcggcagcgtttatagagatacaggataatttccatcatcttaaactgctttttcatcggaacacaggtgtcctcggcatgaaaggcattctgctggaggaagcccaggcggattaccttggcgatttccagtaccagcttctgatcgtcgggcagaacgtcgctgcctatcagcttgacaatctccatcagtccattttcctgtgtcaatatatagacaagctggttccggtagtcgatgaagcgcttatccacattttccgtataccagggcgccaaatcggtcagatattcagaatagctggtcagccactggatagccgggaaatgtctggcataggccaggttcttatcaagcccccagaagcagcggacaaaacgcttggtattctgtgtcaccggctcggagaaatcgcctccctgcggcgagacggcgccgataatggaaacggaaccttccgtaccgtttaagttctgcatcattccggctctctcatagaaagcggacagccgggatgccagataagccgggaaaccttcttcggcaggcatctcctccagacgcccggaaagctctctcagcgcctcggcccagcgtgacgtggaatcagccatgatagcgacgtgataacccatatcacggtagtattccgccagggtaagaccggaatagagactggcctcacgcgctgcaaccggcatgttggaggtattggctatcagcgtagtgcggtccattaagggattgccggaacgcggatcggtcagctcctggaactcttccagaacctgggtcatctcattgccgcgctctccgcagccgatatagataataatgtcggcatcggaccattttgcgatctgatgctgggtcatggttttacctgtgccgaagccgccggggatacaggcggtgccgccttttgccaggggaaacagggtatccaggatacgctgtcctgtaatgagcggccgggatgccggatagcgtttgctgacggggcgcgggatgcggataggccatttctgtgccatcgtaagcttgatttccgagccgtccggctgtaatagtgtgatgagcggatcgtggatcgtatattttccgtctgccgcggcatcgagaacggttccctcaattcctgggggaaccatgggcttgtggacgatggctcttgtctcgggcacttcggcaaagatagaaccctgatacagcacatctccttttttaacggtaatatgagtgtcccacaatttactgccgtccagtgactcgacacttacgccgcggtcaatataggcgccgcccgtttttttgatttcagacaggggcctttcaattccgtcaaatatattggtaagaatgccgggggccagtatgaccgatacgggcgagccgcttcccgtgacggattccccgggctttaagccggaagtctcctcataaacctcaatcgttgtccgctcgcttgtaaggccgattacttcccccaccaggttctccgtgccgacatagacgagttcattcatcttaaagcccggatcgcccttcaggtagacaatgggaccgttgataccataaataatgcctgttcgctccatcttatctgcctcctatccggaactggaatttatcagagatttccgccagttttgttttaaatgaattatcaatcagaatatttttcgacggaatgacggcctgtataccgcccagaaacgtagtgtcgctgagctttatctctgcgcccgtatgcaatgcgatacggtttaacttatcctcgtcggatggatccagataaacggtcatcggagcgtcctgggcaaattccagcgcttttttaacctccgattccagaaaccgctgatagtcggctgaatccatgaaaagggcaagccggttcctcagctcgctgatcagcatgattttcagctcctcctgcttctggctgtattcccgcttgatattgatctgttctatcgataactgcttgttgatttcgtgttcaattttttccacctctgcgtccacctgcatgtcggattgacgcctggcatcccttttatgctcttccaggatagaacgcagggaggccgtatagtcggccagcattttattgctgcgctcggtagcatccccatagcagagggattcgaaatgttccagtttttcttcaatggtcaagttatgttcacctgctttccagtactgcttttcagcttttacagtggaatttctgttatagcttgaggccgattgcctcgttcacataggcggtgataaagtccggcttgcggccggtgccgtgacggtcgggaatttccacaaaaagaggaaaattgtgttccagtctgacacggttgatgagatccggaaagtcgcgcccgaatttttcggtcagcagaacaatacctatctctttatcggcgaggactttatcgagagcctcttttacttcctgcatttcatggacaacaacgccctcgacgcctgccaggcgcattccggtgagcgtgtcaatgttgtcgcttatcaggtacatcttcattataacttaccaaggatcatgaaggagatgatcagtccgtaaaggcagacaccttcggcaagtccggcgaagatgagcgattttccgaaaatagtggagtcctcgctgatggctcccaaagctgccgaagcagcggcggaaacagcgatacctcctccgatgccggaaagtccggttgagagggcggcagcaatgtatcccataccggctgccgagtttactgcagattccgcagcctcacctgcggcataggcctggcctgagaacatgaggacggatgcggttatcagcgtgccgaaaaagagcagtgcgttgacgcccagggcagttttatatctgcccctggtcttttcgccggcggcgaaagcgccgaaaggaacggcgatactcaaaataagtgctgcagctaatacgattttaacggttaatgacataatagtaatcctccatatctttattcacgtattttatataaagttgtgtcatgcctttccatagggcttgaactcgcgtccgctgcctttatagaaacggctgaatatttcataatattccagtctcagaacctggatcccgacaatcagtccctccattgcacagacaaacaggttgccgatgatgacaacagcccagttgagggaacctgattctgcgcctgccagcatcattacgacttccatcatggctgcatggctgacggcgaaagctcccacacggacaaaggacagggtgttggagaaatagctgagcagcatctcaaacatctcgaaaaagccctgtacaaagaacatgacccgggaatcggaatgctttccggcctgtttcttgaccagtgaagcaagcggttccttcagaaagataatgacaagcggtatgccgaacatcacggcaagcacccaggctgcagggagcgttttccccatcatgaagagaacgacaacagccagtacgcttccgtaaaagacgaggccggccagtccattggcatcaaaccaggatttctcagggtcatggaaacggacggaattgacgatgtttaaaatcattgtcagaacgataattcccattcccagcgcaactgccacaataaatacggtgttcagcttcccgataaacggcagattcatcatctgggccgcaggccgcagccataggggatggattacatcttcaaagccgaagacactgccgaacaggaaaccgaatacggcggagaaaaatccgcagcaggagataaccgcagccagatccatctttttaacccggtaaagaaggtagcctcccaataagagcagcagcccctgccccacatctccaaacatgaagccgaaaaggaaggagtaggtaatgccaatcaggatggtcggatcaaactctccataggcgggcaggccgtacattttaatgaacatctcaaatggccggaacagctttggatttctcagctttgtcggaggcggtgtcagcaggttattatgatcatcttccacaatacagaacgtcttgtcgtccgtctcaagctctttcttaaagtttgcggcatctgtctccgtcatccacccgcagagaatgtaaaaggtgttgacatcatggtttgtgcaggcggccagcttcctcacattgaaattggtgttataggaattcagcttttcgtaggcagccaggatgtcccggcggttttcttccagaatacggctgatttccgaattcgttgactccagtgcagcctcggctttcttaatctgctgttccagtgcatcgatcgcctccccgggagtgccgttatactcatccggcacaatgaaacgttcaaaatgaagggaggtatagattgcatcaattcgttttgatatcacggccggcacaaagtaaacgatggaaacgtaatgctcatcctcatgacatttgtagaggattgtatctaatgattcgtagaccactttttcaaatttggcgtaatactcccgcgggatccggccgaagcggaaccggatatgctggaaatgcaggattgaccggatatcataatccagctccctgaatgggacaatcttgttgtaggaagtcctgagggtatccagttcctcttccagttttcccttgctgtcacggtaatctgccagttccttgtctacacgctgtacggtttcagaggcctcttcgattgaaatatcccgccggccaaaatccgtatggacttattctttctggcggatgtatctttgtcccgggctgtctcattggcattgaaagaattggccaggcgggcagcccgggtaaataattctttatagggattaatctcaatgtaagggcgaagatctttgacagtttttaattctgataaagcattttcaatctgaatttcgtatttgctgagatacagattgacaacccggtctatatcctctttgggaccggttatgcttagaaatttcattttctctatcacggcgtgttcccccctgactcttctttttctataatatccagtatttcaccggcgcccagatgataacgaatcccctcgattacagtaataatctttctcaactcctcttctttaaaatacaaatacgagtagagagtggctatcgaatatggatttcttctggcagcggtgcggtgaatgtgcgccagtatcacgccatacagaatttccaggtcaggcttctcttcaagagacgccgcctttgtctgtgcgccataccaggtatctgagagaacggaaaaaaactcatccatgctttccgcggcaatcagatgctccagctggctgcttcgcagccggtaacggattggtatcagaagctttttaactgcttctccggaaacggtgtagtaccgtttggttctgtaaatccactgcaggttgagcagatccagctttgtaccaaagccctgcaggattgcgtcctgttcccgtctgggtatttttttctttattgctctccatgttacattgaaatagtataaatcaagcgccatctcatagtcgaaatggcctccgtcgccggaatcgcggatacctgcgagcagcgggtaataaatagtgccctccaggctttctatgaattcatccgtcgttgccgcggtgccgatggcagcaaggttgagcttcgaatgagagcggaaaaaatcttcgtatctggacagccccacgggaaccggctgatgggccgccgcattcctaaggcagctttttaatatatcgatctcaaagtgcataaaatacagtttgaaaaactgacgctgttttatcccggcaaaacggtacagtctggcataatccctgtacagggcgccggccagcagacgttcgattgtaccacggtgaagatcttcgctgtccatatccgggaatatatcggagtaggtgggaatggagcgcaaaaaatccacagcttcaggtacactttccagcgcagccatagcgcggtactgttctttggtaagaagctgccccttcattgcgcggacctttgccgtaagtccgctgtaggccagaagtcctctcataagaatcacgctcctgtcatttctttaaacagctgttccacataatttttgctctgacacttataatggttttcaagcttttccagcatatgatcggcgcggctttgctgacaggccagctttttcttcatctcagcctccattgaggtccgcacctcgtcaatgcgtgcggaagtttccgcctcaagttcccggtcaaagctttctgtttcccggcggatctgctctgcgatatcctttttccgggctgccgcgtcatccattattttaacagctttattttcaattagtgatatttttccaataatccgatccatgtaggttacctcctgcggtgattgatgaagttcatgccagagcgtgtcagaaaatctattcccgctgtctgaaccgatctttacaatagtatacgcataacggtgaaaagtacactttcagaaacagtacagaaagcatgaactgtttccatttaacgatagcctgcacgctccgcgcacagatcaccgccttcaattaaaagaaaccatagcagaattgggatattccgctatggtttttgggcagttataaataaagcgatttcagccaatggaatccgaacttctgtcattcaattattcggtgacaggtgtgaggtattcctttgcaacgtaggcatcctggccgttgtatctgataatacaccatctgtcatcatgatcacgcacatattcaacttctgcaccccgggccagctgtacgacaatgcgtccgtctgttgcaggggttgcccgtacgttcagtgtatccgcattaactttgtatttaacagttgcagcttctgtaatcggctcctctgccggactttcactttctgtcggaaccggttcagtcatttctgttgagacggccggtgcagtagtttccgggactttctcttttcccgggtgaatcatcttgatgataaagattaatactacaataattgcgattaatagtaaaggttttataatacttcccgcgtcgaaggaaggaccggaagactgtactctgcgccttctgctggaacttccccctgaggaggagcgccggcccggtgattcatccgtcctgcgccgcgctgatgcagccggtgcaggtttacgccgccgttcgttgtagtcgttggcaaatgtgtaaacctcctgtgagagaagatgatgggcctgattggcattgtaggcgctgttgtcttcttcatgaatagccttattgcctatggtcctgatcttgtgataatgttcgcaggtggtcttgctgatgattccatcatcatatagcccgtcaatcatatcaatcaggttgccttccataacgcctgatttctcacaaaggcacttcaccataaattccagggtctggcgtgccttaatcatagccatgttgtactttttctgtccgattagacgttctgtatctctaactccgctttgaattttctcccagctgtttgtgcccggattgtctgtattgttcataggctgtctcctttgtatcagtgttactcaaaccttaattatccctattataatatataggaaaattttatgcacctatattttaaaataaatttataaaattaggaaaaatgtaatatatatcttagaattgccgcagctatttgagaatttacagattaacttgcataaaaatcgttgaaatggtaagatagaaagataaaataaatggaaaaaccatgaaaaataaaggtaaatgtaaaaccaggaggacgcggtatgagactacgccatataccgggcgcagagcagatgatagaggacagcccctacgtaattcagaatcccgaagagcggaagggaaagtggcatgaggttttcggaaatcacaatccgatacgcatagaagtaggtatggggaagggcaggtttatcatggaactggccaaagccaaccctgaaataaattatatcggcatagagcggtattcgaccgtactgctgaaggcgatacagaagagagaacagcttgcaattacgaatatctgctttatgtgtatagatgcaaagaatatggccgatatttttgatatgggggaggttgacagaatttatctgaatttctccgatccatggccaaaggacaggcatgccaagagaaggctgacatcacctcagtttatggaagtatatgataaaatcctgaagaaagacggcaccgtggaatttaagacagacaacaggggactttttgattattccctggaatcggtaccagaggcaggatggaatattttagaatatacatttgaccttcatcacagtgaaatggcggaggggaatgtaatgacggagtatgagacaaagtttgcggcagagggaaagccgatctgcaaacttgtggccgccagagagattgcggcagacggaaaataaaaagccgcatggcccgtcgggtatctgtacatgtgcgataagcatataatgtggaaaacagcagacagcaggtgtgcagatatgagcatgaaagccagaattacccgtgaattgtcgaaagcgacaagtgataaggcggaactaaacaaaaccgttctgaaatggaaaaagcattttgacgaagcgggaaaggtgatcggtgctgacagaaaaaagaagaagtaggaggagttgcgaatggagaagagatttacgagcgagaattttgaaacggaagttttgaaatcagatgtaccggtactggtagatttttatgccgactggtgcggtccgtgcaaacgaatggcacccatcgtagaacagctggcttccgagtatgaaggtaagattacggtcggaaaggtaaatatagacgacagtacggatcttgccattaaatacggcgttatgtcaataccgactctgatcgtattccgaagaggagaagtgttcagaaaagaagtgggagtacagacgaaggcgacggtggcgaaggcgatcaaccaggccatttaataattaattaacttgaagcgtgaatgcagggggatccggcttttgccggagccctcttttacgaataaaaccgggatagttttaataaaatatatactttggatatattttttacaaaactttaaaaaaaaggttgacaattggagatgattgagataaaataatccatgcgtcacgaaaaatgacgaaagaaaatattctcagcgcctttagctcagttggtagagcagtagactcttaatctatttgtccagggttcgagtccctgaaggcgcactgataagtactgattttgcagactgagagctgtggggtcggtgcttttttttacattaagattggacctggcagaattgagcagctacaaaaggagatgtggtatgaaaattggggagttggcgaagcttacgggagtgtcaaaagacagtatccgcttttatgtggaaaatggccttttatttcctgaccggcagggacctcagatggatttttcagacagagagcaggaggatcttttttatatcaaacggttaaggaaggcaaggtttagtataaaagaaataaaatttcttcaatcccttaagcataccagcaatatgctggaaccggatatactggaagaatattgtgatatgcttaatcagaaacaagcatcattggaagaggaaattgaagaactatgtgaagctaaaaaactgcttatgcaggaaaaaatcaatctgcagtcaaccagaaacaatgcaattcatcagttaggtgtaccactgcgtgcattaaaatatattgtctgtccaaattgtggggcccaaatggagatggaaaacgccagaattgtaaagggagggtatattttagaaggcgatatgcattgtgtctgcggccatcagatttccgtcgaggacggcattctgatgaccggaaaccgatatacgaaaaattgggatcatccggattaccgacatggaggaattgtccaaaatgtaggagataatttttacaattgttttcgcaaatgttatgattttattatgagtaatattgaaggagattttctggagggcaaagttgtgatggaggctcaggtgaacgggtattttttcttgtataagcattttaacaggctgcctactgactgcctctacatcatagttgacaagtttccggaaacattgcgtacgtacaaaaaattactggaacagctaaatcttccgcttgaaattttatttatagcggataattcagttaattatcctttgcgggaaaggtgcgtggatttgctcatcagttttttcggcgataatgaatatctgttataccatcatggtttttttattcaagatgccggaagatttatgaaaaatgaaaatctggtactgggtgcaacaatgagtttccggcagaaatctaaatcacgggagcttatgccgatgaaatatccggaatcatccccaaaaactcataatatcaacgagttgaaaaaggcttatgagacacaatcctacgattttatatgtcaggaggttgggactatgacgaaaacgtgcaacgaatatgcgtatgaatgccatcaggatggtgagcctcttgatatgtactatttcaaggctgaacgaaagtaagaaaatagagagggggctcctctctattcttttacgcgaatattttcattctcactttgcagagccagaactgtattgatatgcagggcagtgccatagatcaaagcagccggagacaccttaaaagaaggattgtgtaaatctgcataggtggtgctttctggctctgtgcagccgagaaataggaatgctcccggcacttctctaaaatacagtcctacgtcttctccacctgttagtggttccggtgtgtcattaacgtgttcggcccccagtaattcctttgctgctgaagagattatgagagcaacggtttcatcgttcaccgtaggaggataaccgacttctctttcgtagactgcctgacatcggtgtgctgcggctatccgctctgcaatttctcccagacggaagctgactgtctctcttgctatatcgctgtaagtacggaaggtcccgctcagtataacttctccgggagtggcattccacacagaggaaacagtattgacagtgccgacagtaatcaccacaggatcaaatgggctgatttctctgggtacgatggtttgtatcgcggatagaagttctgccagcgggggaatgacatctatagcgtggtgaggagcgccgccatggccgcctttcccttttattgtgatacgaaaaaggtcagttgccgccatggcttctttccggaatattttcaaattgcctgtcggcatactgggatctacatggattcccatacaataatcaacattcttcagataaccctcttggataatataataggcacccccgcaaacctcccccaggggtgcggcagagggatcgatatcctcttcggcaggctggaaaataagccggagattgccacagagtttttcagggtgttgagaaaaatattttgctgcacctaaaagcatggcgacatgtgcatcatgtccgcatgcgtgcattttacctggatgttcggaggagtaggggagccctgtactctctgtaataggaagagcatccatgtctgcccgaagagctatggtttttcccgcatgcactccatataccgtgccaattactcctgtgcgtgcgacaccggttatggtttcgatattccactctttaagtttgttagcaataagagcggcggtcttcacttcattaagtcccagttccggtatgcgatgcagttctttgtaaagattaatgacttcatcttctaattcatttaattcactgatgggaatcatatttttctcctctttatattattaatgttttaaaatggaccatatccggtaattgctgcataggatataaaaattatagctaccagcaaaatttttaaaattaatggacagtaaaatctcaaccacttatcataaggcaccttgccaaaggctaaaccaataaagagcaggcctaaagtaggggtgaccagattggtgattccgtcccccaactgatatgccagtacggccgactgtgaagtgagccccaggagttctccaacgggaaaaagtatcggcataatagcaactgcctttccggagccggaggggatcaaaatattaattagactaattacaagcagcatccctatagcggaagcccaaacaggaagggaacttaagggcgtagaaatgctatagataattgtatccagaatattgcttttagttataatggattgtacgcctgccgcaacaccgataatcattgcgcctcccgaaatttcagctacacctttcaaaaaggtttcacagatagcattaattctcatacggctcagaattccggctacgataccgatgatgatgaaaacggcactcatttcattaagccaccagtcggttgtaatagccatataagtaaaataaaccatgccaccgattaatgtgcctaaaatacatccgtgacgccaggtgaatatttctttgttcatactgtcaatatcaaatgaaagctcagaaacatctaccccctcatcagacttttattgggatctttctgtattttttttgcgtaggatagaacgtgccaaagaccgattacgtttaatacgacaaatagcacaaggcgcagaccgagacctgaatacaagggaagtccggcgagtgcctggggaattcctacgttactttgatttgtaggaccggcaataaatcccatcatacagccaatcaatgcgacacccacgccaaccatggaatcataacctaaagctacagaaatggctatagctatagggaaaaatggaatggtggcttctccaaagcccataaatccgcccaagacggaaaagattgaaaacaagaataccagaaccaaatcaccgcttttttgattgaggttggaaataactttggaaatgccaatatggagagcgccagattttgacactacctccatgccgccgccaatcattaaagtacagacaaccattccggctgctgatatgataccttccggaatggccagaaatatatcaaatatggtcgctggtgttttttctattagttgataggaaccgggtataacttccaggcgtcctgtagcaccttcaatacgttcaaactgaccagcaggaatcagataggttaatattgccattacagcaattataatgaagagcagtgcaaaagagtttggcatttgaaattcttttttttctttcatttttaacatttcctccttgatatatcatattatttgtctgcatttactctatttatttttacaggcatttataaaagaacgaaataaattttgttgaattgcttccctatacatcatctcaggatgccattggacagccagaaagaagggatgatccggaagttcaatggcctccaatacatgatcctcagattcgccggccgccatgtagcagccggcaagctgtttgatggctgagtgatgataggaattaactggaagtgttttgcatccaaatatggattgaattttacttccttcctttaagttaactgtatgtactggctgatacatgggggattcgtctatagaatgccggttaaagccggctgcgcagagatcctgatacagtgttccaccagccgctacattcatggcctgcattccccggcagattccaagaaccggaattctagtgctgtttaataggctcgtgataatctgtatatcttgtttgtctctctgacttacaagcgcaccgcatttttctgtggtttcttctccgtaacagtcaggagaaatgtcattaccgcctgtaataatgacaccatctaaagtatcaagtaatccttccaccgtattaaagtgttcgcaaatcggaattataattgggatgccgccaatccgctccacagaattaatgtaattgtcagccagaaactgccacttttgcaggggcacccccatatcagtgataattccaatttcatcattttcatcgtagttgcaagtaatacctataattggttttcgtttcataagcctccctctcctaattattttatatatcttgttattcaatactttatcataagggaaaaagtctatgtcaatatgtaataatcaggttttaatgcaaaaagatggacctggtccatcttttagaaggggtaatgctgattctgtgcgcttggttccatatcacagcaattttaatatattttaatttccagtacgaatcgaagatgatataatgaccgcatagcgtgcattataccgcacagaaaccgtaaacagtttctgcgtttaccgcagtaatccgggctgatttccgtcggagactcgtgtgaacgcagggaacatggtataataaaccgatagggtgatgaaacggccttttttacataagtgaatacggatggatgtattcaggaaaggaattacatgaaaataaaaccaggtgacagccgtgaattgagcaaatcttcagagactgagactgaggtttcaacggggacaatcctgattgatcaggattatcatattatctactacaatgaatatgctaaaaaaattctgtctgccggtgatgatgcaattgagcatcgctcggtcaagcattttcttggacagacgtttacacttccggaggaaccggacagcgaaaaatcgttttattatgaaatacagggacggcaaatccttgtcactgtaaccagatggggaggcggggaggaaaaagacgtgcctgcctatctgatactgcttctgcttgagccaaagctggcacagaatgaattggaagagtatgcaaaaaaacaagtgctacaggatctgcaggagatcatagaggcatcctttgacggtattttagttacagatgcggcgggtaacgtggagctggttaaccagggatatgtgcataataccggcattacgcgaaaagagcttctgggaagaaatatactcaagctggtcaatcccgtatggatgaaacagtcggtagtgggtatggtacaggagaagaaggagaccgtatcgctcagacacatgaccaggaatggaaaatccattattgtgacgggtacccccatctttgatgaacagaaaaatataaaaaagattgttgtaaattcccgggatatatcagagctttatgccctcagtgaaaagctggagtcagcaaaaaagatggaagaaatctatatgcagcgactgaagctgcaggaggaacgaggggagaccccggatgacgtcgtcatcgtcaatccggaaatgcagcaggtcttccgtcttgcaaaaaaactggggaattttaatacaaacgttcttcttaccggggagtccggcgtaggaaaggacgaggtggctaaattcattcacaaaaacggtcttcgggcctccaaaccgtatgtcgcagtcaactgcggcgccgtaccggaaaacctgttggagtctgagttgtttggttatgagaacggcgcatttacgggtgccttgaaatgcggaaaaaagggattattcgaacaggcggagggaggcgtactatttttggatgaggtggctgaaattccgcaaagtcttcaggttaagctgctgagggcgctggaaaaccgcgagattatgcgtctggggggaacaaagctgataccattgaatgtaagaattattgccgcgaccaatcaggatctgcctgccatggtgaaaaacgggagtttccgcgaagatctctactaccgtctcaatgtggtaaatatccgcatcccgtcacttcgggaacgaaaggatgagataccgcttttatgtctgaaattcgtccactattataacagacagtatggtgaaaacaaaaaaatgacttatccggttatcagggaatttgagaaatactcctggcccggcaatatacgggaacttaaaaatgtaattgagaacatgtttgtgctgtcggacggagaatatctgaatgtcagggatatcccctggattgggaggaaacagaagcttggtaatcaatatgaaggaagaactctggaggaggcggtggaagaggtagaaagggagcttctcagggaggcaaaagaaaagtttcatactacccgtcagattgcagaacatttaaaggtgaatcaatccaccgtggtccgtaagctcaaaaaatatcaattataaaatggatacaaccagcgttatcgataccattggctctaatcaggcagcgcagtaaattttgcgccgttcttattggagccaaatttatttatatgccgtccggcatctttatgcaaatatgcatcaaagatgcagaacggcatcatttttttgctttattcaggcataaaaacagctttataacgggttaaattataaaatctacgcatctataaacgataaaaattacaataaatcttaatttaaatattttttaatcagaaatagatactttcaggatagaaatgaattgtctggcacggaagttgcttttaataaatccaaaaagggaaaggagtttacggtatgacatcaaaagaaatgctgaatcagcttttagaccagcattatcaaaatgcaatagaagcgaagcagcagggaaagcttgtggcctgggcaacatccatatcaccgcaggagcttttagaaaccatggacatagctgtggtctatccggaaaatcatgcagcagcaatcggggcaagaaagtgtgcgcttgaactgctcgaacactcagaatccaatgggtactcgacagatatttgttcctacgcgcgggtgaacctgggatatatggaggttctggaaagcccggccggcaatataccgcttccggatctgatcttctgctgcaataatatttgcaatactgtgttgaaatggtatgaaaatatagccaaagaactgaatattcccatgattttaattgatcttccgttcaaccatgagtatgaagtgacagaacaaaatgtccgttacatcagaggccagctctctgatgcaatcaaacagctggaaaagctgacagaaaggtccttcgattacgaaaaatttcatgaaattatgaagatttcttccgagacagctgggtggtggaaaaaagcttcgctgatggcccgggccaaaccgtctcctttaaacgggtttgacctctttaactatatggcggtgattgtctgcatgcgggggcgtaaagaggggctggagctttttaaactgtgggtcagagagctggaggaacgaaaagctgccggattggggccgtggaaggatcaggaggagaagattagaatcctttgggatggcatcgcctgctggccgtatctgtccgccacatataaaacacttaaaaagtatggcattaatctagtggcttccacctatccggactcatggacaattctgtatgaagcaggtgatttggacgggatggcgagggcatacagttctaattatgtcaaccggaacctggactacggagtagataatctgtcggatctggtgaaagagttttcagttgacggcctgatttttcattcaaaccgaagctgcaagctaatggatttcaggcagtacgaagtgatacgccgggtagtggagcggactaatgccacgtcggttatctttgatggagatcagaccgatccgagggcgttttcgcttgctcagtttgaaacgaggatacagtctctggctgagacagtggaggagaaaagaaaggcaggtgcgtgaaatggataagccccaacaggaaattggatttttgtgccgggcagccgatcatccgcgggaaaccgtcttaagagcgatggaaaagacagggaagagggcagtgggatgttttccgctctacacgccggatgagctggtggatgcagccggatttttgccggttggaatgtggggtggtccgggagagtcaccccggtcgggacaatatctccagccgttttgctgctccgtaatgagagcaaacatgtcccaggcgctggacggagtttatgatatgctgtcgggcgtgctgattcccacattctgtgacacactgaaatgtgttgccgagaactggaaggcaggaatccccaatattcctgttttccctatggtttatcctcagaatgttgggagcgccgctgctgctgcgtatctggaggatgagtttataagaataaaagagaagctggagcagttggcgggccgaggtatcacggaggaatccctggtggagagctttgatcggtttgagagatgccgttcggtcatgagagaattcaccggtctggccgcatcccatccggatttgatcagtgcaaagacaagacataagatattgaaatcatattattttatggacaaaccggaatataccgaaattctgaatggtattaatgaggaactgaaaaagaggaaagggagccgggattcgaatccggtacgggttgtggtgaccgggctgatgctggagccggatgcgctgttaaatgtgctggatgccaaccggctctgtatagcagcggacgatttggcgcaggaatccagaaatttccgtgtacagggaagcagagagggaactgtattgcagaggatggccaggaggttcttagaccagaggggagatccgtttctctgcgaacagggaaagagcagggggaaacacctgattgaaatggtgcgccagactggggcagccggcgttttgattgtcatgatgaaattctgtgaaccggaggaatttgattttcctgtttacaggaaagagctggatcaggcgggaattccatacctctatatagaattggagcagtcgatgagtcaggcggaaagtattagtaccagaatggaaggatttgtggaggtattacgcaatacaaatgcatctttaggtaacggttcagacaggtctgcgcatttgctgcgctgaccgtgcgaaaatgtagtggaagcaagcatccggctcatcgcacagcgattttatcagccggatgccgtaacagttcatgctgtctgaactgttgcatcttccggcagatcaggggaggttagtgtgaaagaaagtagaggacagcccaaaagtggcatacttatctaagctgtcagcaagtggcaactttttataagtgtttattaaaacaacaattaagaagctattggttctggtggaggatataatccctcgcgttgcaatagtttcatggcttgcttgatggcttttgctttttgtttttccagtaaagcttcaagtatatcgattttatacaaatcgcttggattccatgattcaccagttgataacatctggtaaattgcagtaagaatcattcgggcgattgcaacaatggctcttttcttgccacggcgtttcatcagagattcatatttcttcttgtagtaaggagatttctcggatttgacggctgcatgagcacactgcactaatgcaggtttgaggtagacaccggcacgtgtaacccgaacggatttcttcttgccaccagattcattgctgccaggagttaatccggcccagcaacataaacgtttggagcttgaaaactgagtcatatcaatccctatttcggagatgacagtgattgcgctgtcacgtttaacacccggaatagtcattagaaactggatcgcattttcaaaatcaggatcagaagaaatcaatttttctatttcacggtctacatcattgatttcagctgtgatataatccatatgtgcacggacgaggtgcatacgatatttttgggaatcagtcatctggtatccttcaatggattcaatcacggcatcttctttagatttgaggctcttaagaagtttagaagcgatttcttcatgattgatagaattgccagactgttcaagcaaatagtcaataatggatgtggatgacttcccaaagatatcggatacaacagaatccagtgcgacattacaaaccgtaagcgcattctgatatcgattcttttcactggaacggcaggaaacaatcttatagcgataccttgtgaactcgcgtaaaatacgaatctttttacaaggtatgtaactgccttttacaagtccaagtcggaataaatctccaatccatttagaatctttagtatcatctttgttgccttttacagcttttacccatttggggttggcaatggtgacattaatttcatcttcaagaagattaaagacaggaatccagtatttaccggtggattccatgcaaagatcatgacagtcattgtcaagaagccattgcttgaattcaagaattgaattgttaaaggtggaataacgtttcttctgataggaaggttcgataccaccagtggtagtaatgattgtggcaacgagaaatgatttgtgaacatcgacaccacaacaggttttgtaagtaactttcatagtcagactcctttctgaaaaagataagaagccattgactgaactgccacacaaattaaccaaggcgttaaaacaattcttagtgtacggtcttatagagccacttatttgtgcttgaaaaggcagaacttacactgatttaaatgctgtctaaaacgagaaagaatttacaactcctcctcccgtgctttgtagtgtagcttcttgaaagttattatcgcatgaagtagaggttttgaaaatctttcatcactatttgtgccgcgcctgaaggcgcgcggaatggagatttaaatgaagattaaaaatgtggccgtactcggatgcggcacaatggggaaccagattgccatacaaagcgctctgtgcggatatcgggttacaaattatgatttgaatcaggatatgattagaaaagcagagacatttacaagggactggttcacttccaggataaaaaaaggaaagatggacgaggaggaagcggtcaaagcgcaggggcgccttgtatttaccgacagcctggaaaaaacggctgcgggcacagatcttgtgatagaggctgttcctgatattctggccgttaaaagacaagttttgagcgagacagaccaatacacaccggagcataccatttacgcgagtaacagttcctatattgtaagctccctgtttgcagattcggttaaaagaccggaaaaggtggccaattttcattttttcaatccggcccttgtgatgcagcttgtggagattgtacgggggcctcatgtatcggatgagacggttgatacgctgatggaatttgccgcttccattaataaaacaccggttttggtgaaaaaagaaatctacggatttgtggtaaacaggatattcagcgcgatcactaaggaggcctgctatctgctggatcaggatgtagcatcggcggaggatatagatacggctgtaaaaaaaggtctgaaccacccgcttggcccctggagcttctggatatgacaggaattgatctcgaatatcacgtactgatggaacattaccggatgacgggtgagtttgccgataagccgtcggcagccattgtggagcattttgcaaaaggagaatacggcaggaaaaccgggaaaggtttttaccggtatgaagatggcagcagacgtttgtgaagggagggttattgtagatgggaagttttgtcaggcttgaggtaaaggaacggattgcgtatttgtcactcgagcgtcccaaggcgtataacgcgctgtcaagacaggcggtggatgaactggatgaagcgctagaggagattgcttcatgcgggagtatcagtgtattggtaatcaggagccggaaaaactttgcgtcaggagcggacatacgggaaatggcggatttaacgcaggcggaggcggaaaagttttcattcagcccgacgtttgacaaactggctgaaatcccgattcccacggtagcggcgatcgagggttacgccctgggcggaggactggagctggcactggcctgtgacttgcggattgccagtgaagatgcagtgcttggtttacctgaaattacacttggcattatgccgggagccggaggcacggtccgcctgccgaggattatcggggaggctaaagcaaaagaactgatttatatgggcgaaaaaatcactgccagggaagccggcaatattggtcttgtgaacagagttgtaagtccggatagctttgaggaagctgtggaaactctggccgggaagttgagcgcccgttccggttccgccctgcgtgcggctaaaagatcaatcgatggcagcctgcaggagccggatctcagaagagcgtcgggaaatgagcggcaaaattggtccgccctgtttggcacatatgatcaaaaggaggggatgcacgcatttatcgaaaagaggagaccggagtttgaagccggaaaaagtgaagggagctgaggaaatgagaagcgtagtaattacagcggcatgcaggacgcctataggtgcgttcggaggagcttttaagaatctgggagcactggatctgaccatacctgtgatgcaggaactgattaaaaggagccgtctggatgcagggcggattgatgatgtaatctggggatgcaactaccagaaaacatacagggagaataatctggcgagggtagctgcagtgaaagccggacttccggttacagtaccggggatcacggttcacagaaactgtacctcctcggtgtcatcggtacagttgggattttaccagatcctggccggagaagcagactttattctggccggaggcaccgaagtgatgagtaacgccccgcacacagtggaaggagtccgctgggagaaaaaactggggaattttgaaattcgggattccatgtgggattcgctcacgaatcttggcattgggccggccatgggaattacggcagaaaatcttgccgagcggtatcagataagccgaaaagagcaggatgagctggcgctgctcagccagcaaagagcgtgcagggcagtggatgaggggaaatttaaggaggagacggttccgattgaggtgaagagcaggaaaaaaacggtgctggtggaacgagatgagtatcccagaaaggatgcttccctagaggcactgtctaagctttccgcttccttcaaagaggatggaaccgtgacggccggcaacgcctccgggatgaacgacgcctcctccggcgtgattctggcgtcggaagaaaaggccagagaacttggccttcccattttggcccgtatcatctcaacggcaacggtgggggtcgagccggatataatgggaatcggtcctgtggacgctgtcaataaggcgcttaaaaaagcaggactgagtttggaagacatggagcgggtcgagattaacgaagcatttgccgcccagtatctggcctgtgaaaaggcattaaacctgaaccgtgaaattacgaatgtaaacggcagcggaatatcgctgggacatcctgtgggagccacaggcacacgtatcatcacatctatgatctatgagcttttgcgtgaacggaagcgttacgggcttgtggccatctgtgccgggggaggtatgggaacggcaatggttctcgaagcattgcaaaaagaagatcaggaggagcggtctcatgtataaattgagcgagcttaaacgccgttatcaggaaaagcttgtgacggcagaggaggcggtgcaaaacgtacgatcgggggatcgtgtgcattacgggctttttgggggatcgtaagggaactggatcaggcgcttgcgctgagggccggagagctttccgatgtcacagtctatgccaccatatggggaaacggatatattcccgctattatacaggcagatcctggggcagaacattttcattactgcaacactcatttcagtacgcttgacagaaaactaaataaagagggggtatgctggtttgtacccgtgcagttcagggaaaatccaaagctgtacgcggaaaatgtagacggcgggatcgatgtggcgatgttccagacggctcccatggatgcatacggaaattttaattttggtccgcagattgcggaatattggggaatcttagaaaaagcgaaaaccgtaatcgtggaagtaaatgagaagatgccgataaaccacggcatgcagaatgttattaacctgagtcagattgattatgttgtcgaaggaaaaggctatccgctgaattatttagaatcaaagccggcaacggaggaagaacttaaaattgcggaacacatcgttccccacatcaaaagcggaagtacgctgcagcttgggataggaggaattcccaatacgataggagccatgctggccgattccaaggtggatgatttaagcgtccatacggagatgtttgtggaagcatacctgaagctttacaaggcgggtaaaatatccggcagcaaaaacattgataaaggaaagatggtttatacctttgccagcggcagcaaggaattatttgactttatcgacaataacccgataacatgcgctgcgccggttgactatgtcaatgatataggcgttatcggaagtatcaatcagatggtatctattaacagctgtctgcaggtagatctgtttggccaggtgaattccgagtcatccggctggcagcatatcggaggcacggggggacagcttgattatgtgctgggagcctttcagtcaaagggcgggcagagctttttatgtacgccgtcggtacgggccggaaaagacggaaggagagaatcgctgatcagggcgaggcttccggaggggagtatcgtgtcagtgccgagaagtgcggttcactatgtggtgacagagtatggggcagttaatctgaagggaaaaacgacttatgagagggcagagcttttgatatcaattgcccatccggatttccgggatgaactgagggaagaggcaaaacgtatgggtatctggagaaccagcagcagggttctggcataaaaacgttactgtattcaaatgataaatttaagggggtataagatatgacagtttacactgttttgacagattttgcattagcatcctttttaatactggttggacagctccttcgcgcaaaggtaccgcttatccagaaatattttattccatccagcctgatggccggttttctggggcttttcgctggcagggaatttttgaacattttgccgttctccgattctatggggtcttataccagtgtgctgatgattgtaatatttgcagcaatcggtattaacggatttaagataaataagggcgtcctgaaaagggaagcggagcgtgtggtcggatatggcctgtataagggggcacagagcgctttgcagtggtggcttcccgcactggtgggagtgctggtcatctccaaaatatggccggatattaattatggctttgggcttctcctggcagccggttttttgggaggacacggcaccgcagcagcagttggaacgacaatggcggagctgggctttgccgatgccccggatctggctatgacctcggcaacggtaggcatcctggcgggtgtgttcggcgggctgatctttatcaaatgggccacggccaagggatatactcagtacataaagaactttgcttacctgagcggcgacttaaagaccggtatggtcagcagggaaaaccaggaggagatgggaagggatacggtttcctcaattgccctggatcccctgtgctggcatttgagtattctgatggttcccacaggactcggctatctttgcagcaagctggtaaaaagctattttgccgtcaatattcccaattatgcctgtgcgtttatcctggcactgctcttcttctgtgtggcaggcggtcgtacggacagaggtgtctaccgttatattgataagcgggtgaatacgcgcatcagtggaacatgtaccgactatctggtgtttttcggagtagcgagtatcaagataccgattattgtaaaatacgcaggccctcttttcgttctgatgattttgggcattttcattgtctggtttatacttcgtatcctgggaccggccatgaaccgcgacagctggtttgaacgttctatattcgtatacggctatgcaaccggcgtattcgccattggctttttactccttcgcattgtggatccggaaaatgagtctaagacgctgaacgataccgcatttacaacaccatttctcacaccggtggaaacctttgtatgggcggccggtccggcaatgctgatggggggtcagcactggctgttcatagggatatttgcagcaatgttctttggccttattattgccgcaatggtaatgaaatggtggtatataaaaattccgctgttggaaagaaaggcgattgtgaattacagcggggaagaggaggaacagctatgagaatcgatacgcatccaatcatcggccggatagaaaagggaggatggtcgaatttgagcttgacggcatgaaaatgaacggttatgagggggaacctattgcaatggcgcttaaggcggccggaatccaaatccaccggtacacatccaaacagcatgaaccgcgagggattttctgtgcaattggaaggtgtacggactgtgtaatgattgtagatggaaagccgaatatccgcacctgtgtgactccgctgaaagaaggaatgaaggtgcagacacagtacggcgtctcggcaaaaccggaggagtgaggacatgaagagatatgaattaataatagttggggccggaccggccggcctctctgccgcgatagaggcggcaaagaggaacatgcaggtggtcgtatttgatgaaaattcccgccgggaggccagttgtttaaacagatccataagtttttcggttcaaaagaacataaagcaaaaacaaggggatttatcataggggaggaactgcttgtacaggcaaaagagctgggggtcgaggtgattttaaatgccacagtaatcggcctttatcgtgaaaaggaagtctgcgtcatgcaggatgggcagctcgtacattataagggagacaatattatcgttgctgcgggagccgcggagaatatggtgacatttcgcggctggacgctgccgggcgtaatcggagccggagcggcccaaacgatgatgaaccttcatggagtaaaacctggagaacgcattcttatggtgggatccggtaatgtcggcctggtagtcagtttccagctgcttcaggccggctgtaaggtagtgggagtgatagatgcggccaaacgaatcggaggatacggcgtccatgcggccaaactgacccggacgggagtaccgttctatctttcccacacgattgtggaggcagagggcggcgatcacgtgactggcgccgttatagcggaggtggatgacaagtggcagacggttccggggacccaaaagcatctggaggcagatacgatttgtatcgcagtcggcctgtcgcctatgtcccagcttgtgcggatggcaggatgtgaaacagccgacgatccgagaaaaggcggcctggttccggtttgtaatgaatacggggagacttccatcccgggaatctttgccgccggagacgtggccggaattgaagaggccagttcggcaatgatacagggcagaatcgccggcctggcggcggctgagagaagcggttatctggaagaagatgagatgagcgcattgtttctggaagccaacagttccctcagccagcttcgacagggcatgttcagccatgtaaataagggcaggacagatttaacagagacggatgagggataccggctttcggccagccttctgtcgagggggtatgtggaggactctgagattcaggaattcccctgcgctgtttcccacacgccgggagtgcatccggtcattgaatgcactcagaatatcccgtgtaatccgtgccaggatgcctgccgtttcggttgtatcagggtaggggagacaatcacgtccctgccgcagataagggaggatacaaaatgtgtgggatgcggaatgtgtgttgcaaattgttccgggcaggcaattttcctggtagatgaggactatgatgagagccatgcaagtataacgataccctatgaatttcttcctcttccagaaaaaggggcggcaggaaccgcgctcagccggagcggggacaggctctgccgggctgtggtatcggatgtcaggagcgtaaaagctatggatcacacgaatctggttaccatgctggtaccgaaggaatttgcaggatcggcgcggtttatcgaatttgaggagggataacggaatggaaacaattatggaccgttcaattgatatcgggaaactgattccccagccggacgacgatgtgattgtctgccgttgtgaggaagttacaaaaggggagatccgtcaggctgttcatgatggaatgcgcacattgaatgaaatcagaaggtatctgcgcacagggatgggactatgccaggggcagacctgcggaaagctggttcagtctatcgtagccagggaattaggggtaaaaccgtccgatctccaaatgaatacggcaaggagccctgtcaggcccacggaaatgggagtatatggcaatgagattatagaacaggagggaaaagatgaagcataatgcacaagtggtaatagtcggaagcggcctggtcggctgctcagcggcctattatctctgtaaacatggcattcagccgattgttcttgagaaaaaggaaatcggacacggtggttccagcagaaatgcgggggagtccggcagtctgcaagagatcccagggaacttccgatggcgatgtatgcagtcgaaaatatttggccgggactcagcgaagaactgggaattgacattgaatacaggcagaaggggaatctccggcttgcgaagacatctgagcatctggcgattctggaaaaaacggctctaaaatgccagtcccttggtcttgccatgaccatgctgtcggggaggagacgagaaaaaagaatccatttatttccgatgaagtgattggttccagctggtgtccgacggacgggcatgccaatccgcttctgacgactctcggattttataaaaaagcccgggaaatgggggccagatttatcacgggagaaaaagtcgtttcgctcaggaaagagagaggaagaatctcaggcgtagtcacaaaatgtaatgaatacggagcggaacaggtaattgtcgcaagcgggtttgagagccgggagattctcaatacggttggaattgatattcccatgcgtaaaaagctgttggagagcctggtgacggaggagatgccgtatatgtttgacgaaatgcttggtgtggcgacctcagatttttacgggcatcagacgaagcatggctcctttgtcttcggcggggacgcaggatttggaaattattatgatttccagaaggagacgatgtccaccagcctgtcgccgtccgtgatttgccgtggagttctgcggtatttccctatgctctcggaaatgaaggtggtacgtgcctgggccggatggaaggatgaaagcgccgatgggattccggttatcggtccgattgaggaagtgccgggactttacgctgcctgtggtttttcgggacatggtttcggcattgccccggcagccggaatggagcttgcgaacctgattgccggcggaaaaagcgtgctggatctaagagagttaagatataaccgttttctcccgaaaaaataggatggaggtacacaatgaaagcatttacattcaatatgcctgctaaaatctattttggggcaggggtaagcaaagatttatcggagcttgcgcgccggtttaacgcggacaaggttatgctggttacggatcgggtgatcggaaatacaaaaggttttgccgccatcgcggagggccttgagaaaaatggaatacaagccattgtctacgatgacacgtcaccggaaccgccggtggaggcagtggacagagcggcggatgttatgaggacgagcggctgtcagatggcggttgcggtgggcggtggcagcgctatcgacagcgctaaggcaatgtgtatgctgtgtacaaatgaaggctcggtccgggattatctgtttggaggaagccgcacaattgaaaaccgcccgcttccgttagtctgcgtcccgacgacggccggaagcggaagtgaggtgaccgcatccagtgtaatatcggatccggagaggggaattaagctgtccgtaacccatgaatggctgattcctctggctgcagtgattgatcctgttctgcatatggatatgcctcctgttattactgcgtcgaccggaatggatgcgttgacccatgcaattgaagcgtatgtttccaaaaacgcggaacctttgtccgacgcgctggcccttgccgccattcgtttgatagggcagaatatccgtactgcaacataccggccggattgcctggaggcacgctccgccatggcgctggcgagtctgatggcggctgcagcatttgtcaacggaggtctgggagcagtgcacggtatatcccaggcaatgggcggaattgcccatgtgtcccacggaatcggcaatgctctgcttctcccctttgtatgcgaagccaatctgccgggtaatatggagcgctatgcacagattgcaccactgctgggagaacggacggaggagctttcactccatcaggcagcccgctgctgcgtggatgccatccaccggatgattaaagagctggggctgccggccgcactgcatgaagttaaggtaacgagagagatgtttcctgatattgcgaaaggggcatggaataccggcttatgccgttgaatccggtacctttgagcgagaaggagatccttgatattttagaaaaagcatattagaatttagacgattatatctgaaaaataaagagggcggaagtgtttccgtcccctttgcattagcggtcacgatttgtataaagaggggcattggcatgagtatcagaagttcttatttgacaatcagatcaggcagccctttaagcaggtgttcagggaactgtatgtgaaacttcaggaagagcttgataaagacgactccagaatgttttccggaaatcagatccagcctcagaagacagtcggtgccttgaggagccgccgctgggttgccgattacgaggacggactccagaagatttattataaagagaacattgttgccagaatctatgcaatggcggactggttctcgcccagcgatgtggaggctcccactctagagtgggtggtgttctccgatcggaagaccttcaagcccctgaaaatcagggagataccggatgtgctgtacagcgaggttatgcgggacgtcgatctggcggtcagcgtagctcatgcgggcggagtcgctccggagacaagtcattcaacggttgagatgcgcaaggcggttgtggagtgcaatctggaactgtttaagattaaaaatgtccgcctggaggggagccacgccttcattgatgggaagctggggcagtatacggtgcatctgggaagcggagtggtccaccagatgggaaatgcgatgctgttcgtagtgcctgtccactcgcagcaccggggccgtatcttcctgccgtttgtcgatgatgatccgaagacggcggaaattatgtccaagattcttttatttgcggaggataataagattaaggatccaaccattctggaacagattcgataggattttcagatataagccggacataggataaaaaagaggaagactatatggttaagccatatggccttcctctttttggtgcgttcagataatgtaatattatttcaaaagaaacaatccgatctgtagaaagtgattgtgcataatgcatataaaaccattggaatatagaaactaacaagccataatataatacttttaacgaaaattgaaatatatttacaaaaatacatgtatcatattgaaaaaaaattacagatatgatattattcgaatgtaataagaatacaaaacaatccagcataaaaaggataacgggaggagttaagatgaaagcagtagttcttcatggaccgaacgattttgcgacggaagagatcaaaaaaccggaaatcggagatcacgagatgcttttaaagatgagaaaagcagccatctgcggaacagacatgagaattttcgcaggaaccaagactaagggaatcagatatccttcggtcgtcggccacgagatgtgcggcgatatctgtgaagtcggaaaagaggttgagggcttcagagcgggggacagggtttccatcgcaaatgtgattccgtgcggttcctgtccggcctgtctggaaggcagggagaatgcctgtatgaacagaaaggcgattggctatgagttcgacggcggttttgaagagtacgtactccttcccgagattctgataaaaagcggtaatgttgtaaaattaccggaggatgtctcttacacggcgggagcgctgatagaacctctggcctgctgtatcagaggactcaaaaatgcagggacaggatttaacgatgtggtcctgattgcgggagcagggccaatcggcctgatgcatatgcagctctccaaaattgcaggcgcaaaaatggtcattgtcagcgaaccgaatgagatgagaagaaaagcggcacaggaactgggcgcagatcttacggtaaacccgatggaagaagatttacataaaattgtcatggatgctacaaatggtatgggagccgatgtcatcgtgatggcaatcggagttccggctctcgttaattccaccctgaagctctgtaagaaggggggaacggttaatctgtttgcgggttttgcggggacgggggaatgcacgatagaagtcaacacgatccactataacgaaatcaatgtcaacggcagcaccgcatacaagagaatagattatctggaagcggccgacatggctatcaataaaaagataaacctggacaggattgcaaccgacacctttaaactggacgaattcaaagaggcgtttgagtattgtaaaagcggacagggcctgaaggtaatgattgaaccgtaagcacacgaaaatgaaacaagtaaataaccaaacagaccaaatcaggaggaaaagaattatggcaatgttaggaaaagaaatcagaatgagcagattagttaatccggtgagcaataaaatgatggccatcacggtagatcatgccacatccagaggaatcgccccaatgaccggaattcaggacgtgcagtctgcaattgacaaaatcattctcggcaaaccggatgcaatgacaatgacaaagggaattgcggagcgctgcatgtaccagcacgcgggaaaggtttctattttaatgaagatttccaactactcccctgtggctccgactaaagatacaatctttggaaccgttgatgaggcaatccgtatgggagccgacgcagtatccatgggctgtatgacgcttggagacttccagggcgagcagttcgaggcaatcggcagagtggctgaggaatgtatgagaaaaggaatgccgctgatcggccatgtttacccgaagggagaaagcgttccggccgacaagagaacggcatgggaaaatatcgcatattgcgtcagaagcgcctgcgagctgggcatggatattgtaaagacaacttacacgggagatccggacagcatggcaaaagccattgcctgtgtaccgtcgagcttcagagtcgttattcagggcggagattcatgcaagacactggacgactatctggaaatgacgagagaagcgatggactgcggcgtaggcggcgtgacaatggggcgttttgtatgggactacaaggatgtgacggcgcttgtaattgcgctgagatacatgattcatcacggctacggcgtaaaagaggcaaaagcattgctggcccagcttgaaaatgataaaaattacggagacttttaataaaactggggcacggcagcagagggtaatgaattatggcggggaaatacttattaggcgttgacgtcggcaccaccagcgtcaaggtggcggttatcgatgaaaatgccggcgtgctggggatcagcaaaagctcctacaacctgattactccggagccggattaccagcagatagacacagaagatatgtggagagcgtttctgaaatgtgtggagcttgtatcggaaggcaaggggcttaatttgtcacagattgcgggaatcggaatctcaagcctatgtcccggtctcgccgcgttcggagaagatggagaggtgctggtagacccgattctgaattccgacagaagaagcacagaagaggcagagataatcctgagcgcggtgggaagcgataagctgtttgagataacggccaacaccgcgatggcgggagctacatccggaacctccatgctttggattaaacgcaatctgccggagatttatgaaaaaacgaaatatttcggccatgtcaatacgctgatggccctgaggatgaccggacggtacgcaattgattattccaacgcgtcctacagcaattttttcgagacggccggcggcttcaaatggtcttcccatatctgtgacaaggtcgggatcgacatggaaaaactgcctcctcttctccattccactgatgtggtgggcggtcttatcaatcaggagctgattggaatggggctgaaacaggggacgcctgtggtgataggaggcggtgatacggcctgcgcctccctggcggtgggagtgacaaggaacggggatgtatgtgagtcggtcggaaccaccaatgtgctgacaatctgcgtggatcagcccaaatttgaccacggcttcatcaaccggtgccatgtggtggacggaacctggatctaccagggggcaatgtcccatacgggagcagcctaccagtggttcaaggatgagttctgcaaggatcttcaggatgaatcggaactgacgcaccaggatgtatttatccggatgaacgaagaggcggcaaaagcaaagccgggctgcggaggccttgtgttccttccctatatgctgggggagcgcagcccggtctgggacccgtatgcgagaggagtctttttcgggatttcccttcataccaccagaaaagattttaaccgcgccattatggagggctgcggatacggactccgccagctggcggagatagccggacgagtgacgggaaagcatatcggggaatttgtctccatcggcggaggcgccaagagcgaggtgtgggcacagatcaaggcggatattatgggggtaaacataaaagtcctggatctgaatgatatggctcccatcggggcggcgcttttagccggagtcggggccggatgctttgcagatgtctatgaagcgtccgcgaaggtggagaggaaggtctgccgcgaggtgacggcctcccacagcaatgatgatgtatatgagcgggggtaccgggtctatacggagctgtatccccggattaaagacctgtataaaataacaagcaatttgcattaagaggaggatttcattatgagcaaaaaaattttggcggtcgttatggctgcggcaatggcaatgaccgggctggcaggatgccagggcaaagggacatcgacggcggcaactgggggagacaacggtgcagcgccctctgccgaagcaacaaaaattacgatttgcgtgccggatccggaggcgtcttatatctatcaggcggctcaggagtttgcaaaacgtgcggaagaatattcaggcggcactctgacctttacaatatcgggaaacggttccctctacggcggggatacggcggcaggcatcaaacagctttcggccggttcacttgacatggttattctggccacctcggtctatgccagctttaacccgggattcaacgtgatctccgtaccgtacatgttcgacgatcaggcccagcttctcaattacctgaacagcgatacgggaaaagggctgatgaacagcgtatctgagatgggaatcacaacggtgggaagctggaccagatcgtttcggaaggtcacaaattccaaacgtccggtcaatacgcccgaggatatcaaaggacttgtgctgagagtgccgaacaattccctttatgtggaattcttcaaggcatgcggcgctacctgtacgccgatgaacttcagcgaggtatacaatgcacttcagcttaagacactggacggccaggagaatccgattgacgtaccgtactccaataagttttacgaggtgcagaaatatatttcccagaccgaccatatggcggacgcctggctggttggattcaacacggcaaaatttgataaactgacggatgaacagaaaaacgcgatcacaaaggccggtgaagaggtgcagcagtggaatgtggaatttatggaaaaagaagatcagaccgctcttcagacactgcttgataacggtatggaatataatgaagtttctgccgagaaccgccagctgtttatcgacatttccaagagctgctatcctgtattcaaagagctgattgaggatgaggaattatttaacgccacagccgaattctgcggcaaacagtagggcagaggccggcagacgggagggattgcgaaatgggacggaagaaatcaccgctttataaattatttgactgcatggactttttagagaatgttatagttggggttgcacttacagggatgttttttacaattatggcccagattatcggacgattggtagcacatccgtttccatggacagaagagacaacacgatatctgtttatctggatgatgtttatcgccctggctgccggttttaataaggcggagtcttcaagagtcgttttgttcctgaatctggggccgaaatggctgaaaaaattcagtgaggttttatatgcggtaattgtaattggctttttcggttttatggtgatttacggctgggagctggttatgcagcagaaaatgctgaatgagatgggaaccgcgctgcggattcctatgacgattataggattttgcgtaccgctctccggtgttctggggataacaggcacgatccagagctttctggaatacaggggcaatgttgcaatttccgatgataccaaagcagaaggggggaatgaagcatgagtttagttcttcttgtactttttatcgtgctgatgtttttgggcgtgccgatcgcggtttccctcggagcagcctcggttattacgattatcacgatgtcggatctgccgctgagcatggcggtacagtcgatgtttacctcgatgaacagcttcatcatggtagcggttccgctgtttatcctctgcggctcactgatggatgagggaggcgtggcggaccggatttatgaactggcagatgcgggcgttggctggatttacggcggactcggccatgtttccgtagtggttaacatgctctttgccggaatgtccggctcttccgtagcggcaatcgcctccatcggaaagatgagcatcaacgccctggctaaaaagggctatcctaaagagtatgcgacggcgatcaatctttcgggctccatgctggcctcggtgattccgcccagcattctgatgattgtggcggcctccacggccaatgtctccatcggccaggcgctgattgccggtcttatccccggaattatcatcggccttatctttatggcgtacaactttgcttactgtaaaaaacacggaatcggagaccgctcaagctttgagctgaaacggcttggaaaggcatttctcaccgccattcctgcgcttctcacccctgtgattctgttgggcggggtatttaccggattttatacgccgaccgaaggcgccgcaatcggcgtaggctacacgattcttgtgtctatttatgtatacagggatttaaagtggagtgatattccgaggattatctgcaaaaatgcgagaacgacgggaacgattctgtttgtggccattacggccaaacctgcctccctgatttttgagatggacggacttcccggacgcgtggcgaatatgatcatcggagtatccgataaccgcatcgttatcatgtttattctgtatgcattcctgatacttgtaggtatgtttatggatgcaacggctgctatctacatactggttccgattcttcttccggctgtgatttcagttggagtatcgccgctgttttttgtggtattccttgtaatcacactgtccttcggattaattacaccgccggtcggcgtgtgcctgtatgcagctcaaaatgtcacgggcctgacactggaaaagataattaaagcgtcggtgccgtggatcattctgattgcaatagcgctgtgtattttcatcctgtttcccggaattattaccgggccggtgggaatgctgttcggtgttgctgttcacaccatgccataaagcggcatgctgcaaacaataacacgcttcgcgatgcacagaaactgcaaaaaacgcagtttcgcgccgtgtaactcgggattttcgtgcagaaaacgcacaaaaacacctcgcgggacataaccatgtgaacagtaacggttcggttcataaacgagagggaaaaataggaggtaataatgttgaaaattgttatattggacggatatacggaaaacccgggcgatttgagctgggaaggttttgaggcgctggggaatgtgacggtatacgacaggactccggaagataaaattgcggagcggattggggatgccgagatagtcatcatgaacaaggcgccgatcaccggggaaacaattgccgcgtgcaggaatttgaaatatatcggcgtgctggccaccggatttaatgttgtggatacagaggcatgtaagaaggccggtatcgtggtggctaatatcccaacatacggaacggatgcggtcggccagtttgccgtcgcgctgctgctggaaatctgccatcacgttgcccaccacagcaatgctgtctatgagggccgctgggggataatcccgattggtgtttctgggattacccgctgattgagctgtcaggcaagacgatggggattatcggtttcggccgtatcggcagggcgacgggcagaattgcaaaagcaatgggcatgaaggtcatagcctgtgacgaatatcctagcccggagggggaagcgctgggaacctatgtcggcctcacggagcttttagagcagtcagacgttattgccctgcactgtcccctgacgccggagaatacggggcttgtctgcagggaaacgattgagaaaatgaaggacggcgtgattattatcaataattccaggggaccgctgattaatgaagcggatctggcgcaggccctgaattccggcaaagtttatgctgccggtctggacgtggtgtccgctgagccgattcgtgatgataatcctcttttaaaggcaaagaattgtttcattaccccccatatttcctgggcgccgaaagaatcaagacaacgtctgatgaatattgccgtggataacttaaaagcgtttctttccggaactccggtcaatgtggtgaatccgtaatcaatgcacagaaactgccaaaacgcagcttcgcgccgtgtgactcgggaattttatgcagaatacgcacgaaaacacctcacggaatagaaccgtgtaaacaataacagggatttttcagcggaagttgaaaagtcctttttgtcttttcgtgaaatatcttaaaaagtgcccgcagtatgatataatggtaaaataaaaagccgccggcggcatcaggcagcacaaggcagtaaaggaagatagggggaatatgtgtggttgaagtaagctgtaaagaaaagattatgggaagcatgcatctgctgaccaacagtgagagtaaaatagcaaaatacgtccttgataatttcaatgaaacgctgaattataatgtgtctgaactggcggacaaggccggagtcagcgacgcctccgtcgtccgtttctgcaagagtcttggttacaaggggttccaggattttaaaatcagcgctgcgcaggatattctgccgcgggaccgctattttaatccgagcctggaacagaatgacgatgtgatgacaatatgcaaaaaaatatttaatctggagatggcggccctcaacagaaccttctctctgattaattttatcgatatggaagcggcctgcgaggccatcagcaaagcggataaggtgctggcaatgggcagcgggggcagtctgattgtggcgaaggatatgcagcataaactgatgaaaatagggattcagtcatttgtccatgacgatatcgacttgcagatgatggcagcctcccttctgacggagaaagacgtggcaatttgtatctcccattcagggagcaaccgtaatatcctgagcggcctgaagctggcgcacgataaaggggccacgacgattgcgctgaccggccagggaaagactccgattgccaatacagcggatatcgccctctatgtggcctctgagaaaacgatgttccgttcggaatcagccagcaccaggatagcccagctttccatgatcgactctatggtatcgattatagcatttaaaaattatgagaaatcttaccgtgccgtccagcagacgagacaggcaacggcagagaataaattttaacgcacatacaggaggtatgggatgaaggttacaattgcaatcgattcgctgaaagggagcctgacctctctggaggccggacaagcggcggcagaggggatcaggagagtatacgaagatgccgatatctgtatccggcccctggcggacggcggagagggaaccgtggaggccctggtccgcggaatgggcggggaacttaaaagaatcacggtgacaggcccactgggaaagccggtggtctgtgaatacgggattatcaaagagagcggcacggctgtcattgagatggccggcgcggccggaattacaatggtggacgaggaagagcgcaacccgctttacacgacgacatatggcgtcggggaagtgatccgggatgcggtcaggagcggatgcagaagatttgttgtgggaatcggaggcagcgcaaccaatgacggaggtatcgggatgctgcaggcgctgggatacggtatccttgataaggagggcaggcaggttccctatggggccagggggcttgcagaaatcgcgtctgtaacagacgataacgttttgccggagctttccggctgtaccttccggattgcctgcgacgtgacgaatcctctgtgcggagagcagggctgcagcgccgtgttcgggccgcagaagggggcggatcctgagatgatccggcagatggacggctggctggaacactttgccgctctttcgcaggagaagtacccggctgccgatccgctccgtccgggaacgggagctgccggaggattagggtttgccttccttggatttacaaaggcggtgcttgagtcgggcgtgaaaattgtgctggatgagacgaagcttgaggactatgtaagagacgccgatctcgtcatcaccggggaagggcgtctggacggtcagaccgtaatgggaaaagcgcccatcggagtggcaaagacagcgaaaaagtatgggaaaccggtaatcggcttttccggctgtgtgacgaaagacgcagtggcctgtaaccgggaaggaatagacgcgttttttccaatactgagaggagtggtgactctggacgaggcgatgaagacggagaacgcaggtgcgaacttagcggatacggcggagcaggtgttccgtctgatccgggccatggcatagaagagcaagacataaaaaccaataccggcctctgcgtggcagcagaggccggtaccggcttttatgggttcaaagttcagtgagagtctgactgccgaggtgttcgagggtcctgtggcagtcattataaggataggttgaatatatgtaaaggcttgttaagccagtttaccaactgctttttcaacggcttcaacgaattcgccgtcttttaatactttgaaaatcttgttcatatctttgtagattgcgcggtctgtctccataaaggatacctcgcggcgtaccaggtcgtaaacagcctttgtgccttttccgagtttgtcggcgcccttgaaatcagcggcctgagcagcacagataagctcgattgccagtacatgctccgcgtggtcgatgatggtggctgccttacgggaagcgatggtgcccatacttacatggtcttcctggtttgcggacgtaggaatgctgtcaacgctggccggatgcgccagaaccttgttctcggatacaagagctgcggcagcgtactgtgcaaccatgaatccgtcgttgattccttcctctacacagaggaaaccgggaagtccgctgagctgcgggttaacaaggcgctcaattctgcgctctgcaacattggcaaattccgccatggcgattcccagagtgtccattgcgatggcaacaggctggccgtggaagttaccgccggagaagatgtctccgttatccgggaagatcagcgggttatcggttacggagttgatttctgtctcaattacgcttcttacatagtcaaatgcaagacggcttgcgccgtgaatctgaggcaggcagcgtaaggaataagcatcctgtacacggatctgtccctgtctggtggtcagcttgctgtcctgtaaaatctgaagcatatttgctgcgacatcgatctgtcccttgtgcggacgaaccatctgaattcttggatcgtaaggatcgatgataccttccagagaatctacggtaagagcagaagtgatatctgccatctttgttaaaatttcagcgtcatggatagccaggctggctacacccagcatagcgcaggtgccgttgattaaagccaggccctctttcgccttcaatattacaaccgggataccggcagcttccattgcttcgcggccttccatcactttaccctggtattctgcttcgccttctccaatcataggaagaaccatgtgagccagagggcacaggtcgccgctggaacctacggagcctttttccgggattaccggatgaacgcccttattcagcattgcaatcattgtctcgactgtcgataagcggataccggaaaaaccttttgcaagcgcattgacacgcagcagcatgatagctcttgtcacgtcctgtttaaatggatcgcccacgcctacggcgtcggataagataaggtttaactgtaatttgtccagttcattttctgatattgccacatttacgaatttaccgaaaccggtattaagtccgtaaataacttttttctcttcaatatttttttccacaatgtcacgggatatctgaatattcttttttgcttcttcgcttaagcccacctctgccttgttgcgggcgatttctaccacctgatcaattgtcaggctgctgccgtccagataaatcataatatgtaaaccctccaatcacgtaatttgccgcttcggcggccgttcgttgttttgttagttacagtctacacccgggctgtcgataaaatgtcgatgcaggggcctgtactaaaagtatattcctttttttataaaaacagaagcgtattttttatcgtcgttttgtttttttaccgacgatttaggaaaaaagtgttttggctcatgttttttcttgtcttttgtatattctaaatgttaatatgataacgaagggatggtagaaaattacatggatgatttagagcagtacaaagacagacttcgtatcgcattaagctccgcaaaaatctgcatttttgaggtggatctgctgcggcagttatataccttttttgaaaatgcggaggacatattcggcgtctccggtgatagtattttaaaggatgtgcagtcatacagcacactggctccggaagcgtaccggctggctgtcagcaaatatttttcacatccggacgattcggcagtgattgaggcagcttttgcacagatcctgagaggagaaccggccacctatgaggctcggatgaaagcgggaggctcggcgttcatatggtgcagaatttctgtgacgccgattacagaagatggcaagccggtaagaatggttggcgtgattacagatatcacggatttgaaagaaaaaacagaaagtttgcggagggccgtcaacctggactcatttacgggtctttataataaagatcacacgatagcccttatcaataatattttagacatgggcacgcatgtgaaacacgctctcgtgattctggatatcgataattttaaaaaatttaacgatacttacggtcatgaccagggcgataaaatcattaaagcattgtcacagaaactcaaaaacacgttcagaaaaacagatattgtgggacggtttggaggcgacgaattcattgtatttatccaaaatatcgaagacgatcaatggctgcgtgataagctccatcatcttatccgttttgaagcaggaacatttacctgcacgagcagtatgggagtttccgtttttccgttggatgcggcaaactttgaaatgcttttcaaaaaggcagacattgcgttataccacgccaagtccgcaaaagagagagctgtgtttttttcggatcttgacaggaatgaaaaaaaggattctctgaggtaaacggcgcctggttttacaagggctgctgttaatggaaagttattttccgtaattccttacaaaataaacttgtgtttggttgcgtatttatcaaatatgcattaatattgtagcaggacactttgacgggacttggggaggccttgtttgatgagagatgtaacagtaacgctaatgaatacgccgtccgtggtggtggatggggaaaagaaagtatttccttacaggaaagtcgaaggtttattttactatatctgtgtcagaaaacggatcacaagggatgaagcgatagggattttctgggttgactgcgatgagaccagcgccagaaaaaatctgagggatgctttatatcacattaaaaagatagtagggccggatatcatcagcatggatgggaatgtatttatatcgctgaatccggagcagcatattaaagtagatgttgacgccgccagggagaatatcctggaaaattacaagggcgagtttatgagtttcttctatgtaaaaaactgtctggagtttgaaaactggatggatgattacaggagagagctgaaggagcattatattaaagccgtcttaaaaaaggcggaacaggctatacacgctaaggacacgtcggaggctgcccgttatgcaggcaagctggtggaagttttctatttagatgagagcttttacagacgggttcttacatttttgatggaagaggcggaatattcatccgctatttccctctatcagaagtttgcattgtcgctgaagcaggatctggaggaggagccggaggcggaaacccgggcgctgatggacaagatcctgaagctgcgcaagaagatagcagagcatcctgtaaaggagcagcaggtcttcatgggccgtcagaaagagctgtatggcatttatgagagcatccagaaacacagggtgaaggggaaggattccggagaaaatttcgttcttatatctggggaagcgggcgttggtaaaacggctttgatggggcagctccggaccctgctggaggaagagaaccacacggtattctcgtactgctgctgtccttcggagtctgatttgtacctgaagccatggaatgatatattaagccaggtgcaggagttctgcatgaagcagaggaaggaactgaaggcatctgaatactttgccaacaaagatgtgacggattaccgcatatttgcgacgcagtacggtattcatctggaggatttaatccgggctttctgcaaggacttcggccgctcggaaatcatcctgtttttcgatgatatccagtggatggatccctcgagtatccagctattaaataatacgttattccaccttagggactgcccgatttttatcgtggcggccagcaggctcgaggtcgtaaaagaaattgaggatttgcgggtttctctgatgcgggaggcattaatcaaagaggtaaagttgaaacggttcactctggaggaaacgagagaactgattgaggttcaggcgcaggaactgctgggcgatccggaaaacctggacaaaatttatgagtatacggatggaaatgccctgtttctgaccgagcttcttaagacaatgaaggacaacgacggagggatggtgccggagaatccgctgacctccaggatggtgagtatcatccagagccgtctgatgaagctgacggaacaggagcatacccttttgagtgtgatgtcggtattctatcatgcggtgacaatcgaggatatccagattctctatccggaacctgagcttaagatatatgatttactggaacatcttttggagcgacagattatctatgaggatgtggggactgcagccattacgtatcattttacccatatattgatacataactatgtccagtcgaagatatcggccggcagaaagcagatctatcaccggcaggtagccggatattatgagcagaagtacaaggagacaggggatatcaccttgatgccggaattgatttaccacttcgaaaatgccaatgatatgtacaaaaaatatgagtacaagctggagtatttcaaggaatttttctcaggaacccaggagatatatccggccatgtctttgagctttacggataaattcttcttcccggatctggattccagcgaaaatgtgctgattccgttggctgaggagatacgcgcactgccgaaccgggatcagagatatcaggaactgcgtatgaaggtggagtatctgattggaaggtatgacctctcaagcggtgattaccagtatggcctgcgcaatatgaacgcctgtatcgaagcggcaaagatccttaaaaattcgcgctatctgatggacagctatctccagatgatttattatgcgatacaggtttatgacctggatatgatgaaggaatatatcatgtactgctccgagcttttggaggaataccagtactctaaatcaacaccatacacgatacaaaggctcaaggctttgtattacagtaagacggaacagtttgacaaggccgaacagatactggaatcactgattccgaagctggaaaagctgcagatggatccttcctgccaggtaggcctgatagcctgttataattaccggggagagatatgcatgaagcagggggactgggagactgcgcatacctatataagcaaagcactggccagcagccatgcatcgcagccaacagccggacttgggatgtcatacaccaatatgggaattattttatacagattggataactatgacaaggcttccgagtatttcgacaaagccagaggctgtttccagaatctttccatccagtggggacgcgccaaagaagaggcgtactccgcgctgctggagctgaagctgggcaaaagcaaaagcgcgctggcgcgctacaaagcggcatgcaagtatgcggataaagactacagtcccaatacgctgctcatgctccagaccgtgtacgcccagctgcaggatctgcccggactcgaacctcaggaacctccgaggaaccctaagcaggcaaaataatgataatagaaaaagaggaaattcagtcataaataatccggctgtatttcctctttttctattattatattaccataaaaatgactgtttttcaagacttgtaatgaggcggaggcgggcgtataatgctgggaacaacggacaatgaacaatcgtgacagttcagacatcaaccactaatcataaaagcagctatatatggaaggggacggtatggaaaagactatttttgatgtgatgcagctcagcaagaacacggaggagctggctgcggttatggactgcagcaggaagacgcagatgtatggcctgtcgctcacggaagaagaggccaaagaactgatagtcagcagaaatgatactctgaagaagtttaaaagggtggaactgggcaggggaatgctggataagctgatttatatgttctgtgattcggaatatataaacagcgataattatccggaaacgctggaagggctgatggaactgttttatgaattcaggaatgagacggatgacaggctgacggatgacgagcttctggcgttcatgaaggagcagtttgagggcgtctgcttcggggatttggaatatctgggaggaacctgcctggagcggtttgccgcttcggtcagatccgggtacgatggcttcagaaagacgcagggcctgggtgagtatgaggcgctttccggagaaaagaggtgggacagtgaagtttacaggcaggttctgagggaacagttctgggagtgacggaagaacgctggtcatagaactgcggttttcagcagggctgttaccggtagtacggggagcgccgaaaggagaagaatatgcagtatgagatgtctcggttaatccggctgaccggatggctggcagaacaatatacttcaaaggacaccagttccatcacgtatgagacggcggaaatgctgatggaggccgttctttattgtattaatgagtatgaagaaccgggagagccgggggaacacggggacgtatcaggggaagatgatggtgtacaggcggaaagagtaccggcggcaaggacggagccggatgcggaaaccgcctggcgctggggatatcaggctgtgcttggaaaggtaaggcgggccgggaaaatttacgaagctgtggtagatgagtttgaagactatggctgtcaaaattacagggataccataaccaggggaatacccggtttttttgtccgttatgacgcaaaattttgtccgcaggatcacatcctttcactcgattatccggtgatgggtggaaatgcattaaacaggggagagaaacggctgaccggtattgatttgatctatgaatatctgaagataatccggatggaaaagaaattcctggactgttttgatagacaggcggttgtaaacctgatgagcgccatttatccgcagtatcaggaattatatctggataatctgtgcagtccggtgcttttaaatgccctgggctgtctgattgccggaaaaccggttggcagactggaaccgggacgggacggcctgtgtcttatagaaaactatttcacaggctgcggggcagaggagatagagcgtaagctggcaccgtgtatccgtattctgaccggtaatttggaatggtttgacaggtcggcaaggcattatgcgccgcagattgaaaatgcgctcagattcggctgcctggatcggcttttccaggtctaaaaaagggaagagacacctatcacaatatctcttccccatatataatcaccatttttatacagccggcagccgcttatccatctgccggccgctgcatttatcactattaattcaagaggtttttaaaaatataactgttccattgagaaagtatgtgttctcagatagaatttcagaacttcttccagtgcatacaccggaacaggtcctaccagctcacagtcctctacaaggatgccgtactgggatgcttcggatttgattgtctcaaatacacggtgaataggagtcttttcatagtttgtcaggttcatggatacctgtacaatgccgcgctcttccagaggaagcgcgatagcgcgcacgttctggtaaccgcccgcagcgccccttacggctttgacgatctgctttgcgattgcgatatcggcagtctttaagttaacattgaaagcaacgagcgggaaacggacgcctgtaacggttgcgccgctcttggcgttgaaatccttcgggccttcatccggaacccatgcaggatctttcatgcgctcgcagagcgcttcatattcgcccttacggatgcggacaagattttttctctcttcgcatgtagcggcatcttcataataataaacgggaactcccagctcatcgcccaggtatttgccgaaagctcttgcaattacaagcgcttcgtcgatggatacgtcttttacgggaatgaacggaacaacgtcaacggcgccgatacgcggatggcttcccgtatgcttagtcatatcgattaattcgatcgcttttgctgccaggcgctttgtaccatctaagacagcctccgggctccctttgtaagtaaatacggtacggttgtggtttgtattggaattgatgtccatgacatcaactgcttctccgtccagtagagcggcttttacctgctcgaccagatccagatctttgccttcgctgatattgacttcagccattaatactttcattgcttttcctcctgatcttaattcatggtgcttttatattaattatttgttacatcataattggtgcatcttaattgttacatcatacctttgccgagatcttccatggcctcttccatctcccgggtcctggcctcgtccttaatcatggacaggttagcctggatgtttaaaacacagccctttactcccgattccgacagatacttggcgctcatgaggtctgaaaggcaggccggattggaagaaccctcgagacggcatacaagctcgtagactctcttattattatagccgttgttttttggaacaagggcagcctggtaagcggcgtcacggacagcctgttttctcacttctttttcttcatcagttgatttgggaagagcgaaagcatccttaatcatacagtaagcttccgtatcctgctcggagccttttaacagtgtttgggccagttcgtccagttcttttgacatggccgtatattcttcctgagtgaggttaaccggttttgccatggagagctttgcaaccatggaagccattccggcagccatagcccctgcaagtgcggaggcagagccgccgccaacggtaaaatcatccgaatcaaccaccttgttaaatacgtctaaatacataaaattcctcctttagccgcaacttttccttttttaataatcgtttcaatcggattacggccatatttataaattaagtcttcgtaagtatcggtgtcgagaatcagcagatcggccagcttgccgggagtcagggaacctctgtcctttaatcccattgctttggcggcgccctttgtagcggcgcgcagcgcttcttcagcgctgaaaccatgctgtctgcaggcaagcacaaggatgaaaatcatggattcacaccaacagccgggacagcagttggtagccagtccgagatccatgccgatatccagcatcgggcgcggatcaacctgctttggatgatttaccgcaaaatcggttccaaccagcaatacgcctgtgacatcggcgtcttttagcttctggaacacactgacaggagtataattcagatgatcggcggacagcatatgcatatcggcggccagatcagaacctcctatataggagtaggcgtcggtgtggattctgggggccaggccatagtcacggccggcggccagcacggtttcacattcttttgccgtataatgaccttcatcgcaccagatatcgttgcagacagccagtttttctccggctacccgcgggatcatctctttgcagagcagatcgatgtaatcttcttttttcatgccttccgtccagccatgagcgcccaggaaggtggagaagatatccagaggaagttcttcgttcaattcgcggtttacttccagcatacgcagttcggactccattgtcaggccgtaaccgctcttgccttccagtgtagtggttccgttcatgaacatattttccagacgccgttttgtctgggcctttaactcctctttcgggaggttaattgtcatatttacagaggcgtaaattccggagggaatcccttttttagccagggtttccggattgtcgtcaaccacggaaacggcatacgccgcaacgcgtgaaccgccaaaggttacgtgggtatggcagtctatgaagccgggcagtactactttgccggttgcatcgatggtttcaacctcggtgccgccggccctcagtccgccggccagtttctcaatatccccggttttaccggctgcttcaatcaaaccgtcccggatcaggacacttccgccttcaatcaggccgatatcattattgtgatcgccttccatggtcaggagctgtctggcgttatggatcaggagaacttttttaccgttgtccatcatggatctcctttcattttaagcataatcaggagggcacataagtacccttatgaaccctcctgccatattgcgttatttgtatattatctgatatattcgccttccggagcaaaggtaactttatcagccggctcccaccacagcggaatcttgatgctttcgccgcctgcgatcttgccgtttccgttgcagacatcttttgcggactggtatccggactgtgcatgacggacaacaccgataccggagtcaacggtcagagcggagtcaagtcttacgtcagcttcttctgtaccatcagcaatcatggtaacacctgtatgtacagcctcacccatggagtagttagcctggatagcgatcaggtcgcagcctgctgcacagtttaataagccgtttaagtatggccagtcggagatgtagtcgccgccatctggcatgttctcggactcgaatgtcgggttaacgatagaaccggagtctaagttatctctggagaatgctaccgggccctttacctcgcccttcttaattaattcgtttactgcaagaccaaaacgtcttctttcgccaaagcccatgtagcagatacgtgccggaagagcctcgatcggaaggtgttttctggccaggttgatccatctctcaaccaggtggtcacccttgcagatttcaagtgccaggtcatccagacgagccaggtcggccgggtcaccggagatacaggtccaacggaacggtccgcggccttcgcagaacagtggtctgatgtatgctgctacgaaaccttcaatctgttttgcttctttttcaggcatacctgcatcgatacactctttacggatgcttgtgccgtactcaaatgcttcaacgccgcgtttcttgaattcgatcatggcgcgtaactgacgctgcattgtctcacgtgctgcttcaaggtaagcttttctgtcttcgcctctgaatttatcagcctcaactcctgtgtatcctgatgggatataggaaatcgggtcatggcaaggacacatttctgtaacaacgtccggaaggaagttcttagcaagagcctcttcataaacatctgctgcgtttccgacaacaccgatggagattggctcatctttctcaagatgctctttagcgatagcgatagcttcatctaagcttctgaccatcatatccatgtagttcttctcaatacgtctctggataactctctcatcagcgtcaaccaggataactaccgcaccgtgcatcttgccggcccatgtctggtttccgcccatgccgcctgcaccggctgttaagaaaatcttgccgtgcatgtcattatcccactcttttttaagagcgatagcggacagagtctcgaatgttccttcgataacgccctgtgttccgatgtactcccatggagcagccgtgtactgagcgaagattgtaaggtttttatcctgaaggtcgtagaaacgctcccagtcagctttcataatattagtagtagccataacaacacgtggagctaatttgtgtgttctgaaaactgcaacaggcataccggactggataaccagtgtctcattatcttcaaggtcttttaaggactgaacgattgcatggtaggattcccagtttcttgcgcattttccgtttccgccatagataaccagctgctctggaatctcagcattttccatattgttctcaagcattcttaagatggtttcctgtttccagcccttacatcttaattcgccacctctttgagcttttacggaataatagatttccggttttccttcctttgctggatacatgtttccgccgttcattgacataactaaattcctccatttctttttgtttgcttttttctttgtttttctctacaccctatgtagtattgttttttgccgttccgatattggcatttcggaagtggcgtttgtttgtatctgatggttcaagtatatgtacaggcagtcgaggaaatgtcgatgtttcccgtaaaataacaggatgttaaaattttttttggaaagcttatatcgacactttctcggcggaacgtaaatatacttgtcatagtttttgtttagaaactggaattacactgtaacaaaaggacataatcgaattctctttaagaaatcacaggcaataagatgttttacaggagtttaaaaagaatagtagaacattaaagattcagtgatctattgggagtaaggatggaaagcgggggatgctgaaagcgggagagaaaaagaaatactattatattagagggctttatgctaataaagtattaaacagtaaggtgtttctctgtatttaagatgaatggggaaacggctccggctgcacggctgcatattacaggcaacacgtgcggcaacggtaaacatgaaatctgtttacggggccagtatgttagttaggaggcttaaaaatggaagacttattaaaagaggcgcaggaactgcagcacaagatagtagagtggagaagaatacttcaccgctatccggaaacggggttagtgcttccaaagacagcagattttgttacaaaacagttaacagcggcaggcattgcttacaagacttataagaaccattcaggaataacggctgtgattggcaagggtgaggggaaaacaattgcgatcagggccgatatggacggacttcccataaaggaagagactggtcttacatatgcttctgcaaatgagaatatgcacgcctgcggccatgacgctcatacggcgatgctcattgcgacagcagtgatgctgaagaaccatgaggatgagcttaagggaaaggtaaaacttattttccagccggcggaagaaggacccggcggagcagagccgatggtgaaggatggagtaattgatgatgtggacgcgattctggcgctgcatgtgggcacgatgttcggaccgttcaataacggggacatttgtgtgagctattccaacactacggcggccgacgatcaggtgctgatcaatattaccggttttggaggacacggctccgttcctcatgaatgtattgatccggttgccatcgcagcgcttatcatcaacaatattcaatatattatcagccgcgaagtggccccggccgaatctgcggttattactctggccagtgtggaggcaggaagaggagcgtataatatcattcctgagacagcagttgtaaaaggaacgattcgcaacggttctcctgtggtaagggagtttgtcttgaaacgtattgaggaaattgcaacatcgacagcccgtatgatgaggggaaattgtacggttcagatactggatggctatccggcgcttgtcaatgatcgctcagtagtggagagcttcctgaaatctgcaagaaaactgattccggaagaagagattcatatcgccagccatggaatgatgggtggagaagatgcggcgtttttcttccaggaaataccgggatgttattttttcctgacaaatggtgcggcgtgcccggctgacggcaaacagtatggggcgcatcatccaaaattctgtcttgatgaagatgtcttttacaggggaccggcattattcacccaggcggcaatggattggctggaagataacaggtaaaaaataaataaggggatgtttcgattatgtatttggatgcaatattttattttatggtaattctggccataatggctgtcgccgatattatttcgacagcaacaagagccatgataccttcgatgttttcaatttctgtaatatgtattgtactgttttggagcggcctgcttcctccggatgttctggagctggccggtatcagttcgacgctcgtgtatgtaatctactatctgcagcttcctcatatgggggctcttatgagcatgagggaaatggcagttcagtggaaaacaattgtgatttgtctggccggtctggtgggaatgtgtattctcaatgtaacagtcggcacattattattaggtaaactggttgtgctggccggaacacctccgctgagcggcggtatcgtagcttatatgattgtaagtgagcaggcaaacgcaatggggcgcccggatttatccactctggctttggcagtattcgtattacagagcttcgttgggtatccgcttaccgctttcttccttaaaaaagaagcaaattatcttctgaaaaactacagaaacggtattgtggaaggcgaaaaagaagctattaacagcagcaagaagccgcttattcctcagcttccggagaaatacaatacaacaaacacagttcttttcaaagttgcggttgccggtgtaatcggtattcttattacaattgcaaccagagagttcctgtcccggtatgtaattcttctgattgtgggcgttattctttcggaaatcggattcctggatcgctcaccgcttattaagtcacaggtatttggattctcaatggtagttattattggttatgttgtagttgcaggtatcggcggaacaacaccggacgtagtcctttcctcactgattcctacggttggcgttatcgtgatcggaacaatcggtctggcagtcggggcaatgattgccggaaagctgctgggattcaggaaagaaatggccatctcggtcgctttgacggctctttacgggtatcctggaacttatatcctgtcccaggaaagcgttaaggctgtcagtgacgatgaaacagagaaagaatatctgaggtccagaattgagcctaagatgatcgttggcggttttaccacagtaacatttgcatccgtatttgttgcaagtattctggtgaaattcttctaaacagtctgtccgttttgatgaacggaaagcttattatttaaataaaaccatgtctgggccgcggccttcacatccggaattgtgcctccggttgagaagaccgcggcctttccatttttgaggacagagaatatgcctgagtctattgaaataactatggaagaatgtgtcgaaagaataaagcggaatttcagcgaaaaatacctcaagccgtcgaaagaggggagatgaaagataaagtcatccgttgtaaattcaaaaactctgtgatacactgaaattgtctgattatctgtgcaaacagagtaataatatgacgggagacggaaatatgacggtagaaaaagagataaatacagagaaaaataatgatatgctgacaggacatccgggacggagcctgttgttttttgctttgcctatgatactgggcaatctgtttcaacagttttataatatagtggattcggttgttgtggggaaatttgtcagtgaagaagcgctggcttccgtcggagcatcgtatgcgatcaccaatgtgtttattgcagttgccataggcggaggcgtcggaagcgcagtcattatatcgcagtttctgggcgcggggagagccggtaagatgaagaccgctgtctccacaacattgattaacttcctgatcatcagcatgcttctggggacggtgggactgatcggaaacgactggatactgcggcttctcaaggtaccggagaatgtgttccgggatgcggcggcatatctgagaatctattttctggggctgccattcttgtttatgtacaatgtacaagcctctgtattcaattcccttggggattcacgcacgcccctgtatctgctgattttctcatccctgctgaatattttcctggatttggtgtttgtgatacaattcggcctgggcgtaaaaggagttgcttttgccactttgattgcacagggaatttcagccgtcatttcctttgtccttctgctccggaaagtaaagaaatatcctcatgagcgctcagaatttcatttctatgacggaaagatgctgcgttccatgacacgggtggcgattccgtcgattttacagcagtcgattgtccatatgggaatcctgctggtacagtcggtcgttaataccttcggctccgccgttatggcaggttactccgcggggaccaggattgagtcgctggcaattgttcctatgaccgcggtcggcaatgcgatgtccacattcacagcccaaaatatgggggcaggcaatgtaaaacgcgttaaggaggggtataggttctgttatattatactgggctgttttgcagtcctgctctgcggttccatccagttgttcggacactcctttgtctccgcatttctggatgcggatgccagcagggcggcatttgaaacaggaatctcatacacggatttcatttcctttttctttatttttatcggcctaaagatgaccaccgacgggctgctgcgcggcgccggcgatgtgacggcctttactgtcgccaatctggcgaatttaagtatcagagtatttgttgccaactatttcgccccacggtacggagtacagtttgtctggtatgcagttccgataggatgggcggttaattatattatctcctttacctggtacttgacgggaaggtggagccggatcaggctggttgggaagaaagcagaaacataacagaaacaatagcagaaagacaggaggtacaggatgaaagagaaatcgtatatgcttgctttgccgggggagcaggagccggagggtagaatggaggttctcaggaggcttaaaagtgctcctgattttaaggtggtcactgctgatacggaggatgaagggagccttgagcttacagttgaatataagggaaacaggtacagggcgctgctgtatccgaccggatttgaactgccggagttctaccgatgccagcatttgtttcccgacgtggatattgaagtaatggagagggcagagagcggactggcagtggagatgatgtttggagaagatgcgctggactcttatcaccttcagcttaagctgattcatgccgttcttcccgatgccgtggcagttctcgacgacagctcggaaaagatactgtcgggacattgggttgccctggccgctgtctcgtccgttcccccggcgccccgctacatttatacggcgcaggcggtatcaggggaggaagagatcgtctggctccatacccacggcctgaaccgctgcggcatatcggagctggaagtgctgaattccacgaaggatacatataacagccattacaacgtcctggaaacaatggccaaccggcttctggagctggaagagccgctggagccggaggagcccctgtatcttgcacgcctgaccgaccgggcggctctggttacgacgctggttccctggaaagaagccgtggaattgtatgacgctgatatgctgggaggaaagggtgacagggccgaggggcataacggcaatacaagcgtgatatttacctatccgtccaaagccgattatgaggaaggcaactattcgccgctttcccactatgatgaaattctcggaaataatccaatctactggatatccacgccggagacggaacggatgaaggcgctggccgtcgaacgcgtttcctatatgctgcgcgccatggaggttaaggagaatcatatcctggtgaaggttggcctgactatagacgaggaatatcaggaggacaacaatacgaaagaacatatctggtttgaactgctcgaggcgcaggacggtaaattcactgcaaagctgacgcaggaaccatattatgtcagcggaatgcatcaggatgatatcggaacgtatacatacgatgatttgacggattggatcatatttacgccggaacggagaattacgccggatgatgtgtatattatggatttgtaattttgtttaattaagcagatgaggacgccgccgggacggccgctgattgtctcatgcgttaagtgcgggggggaatttgttgcggcggctaagtgtttccgtgtattaaaggtattattggagtagactggactttttgttattggaaacgaggtgtggaatggttgagattagacctgttattatggaacaagagaagtattttcccctgttgcaggagattgaacccagtggggagatggttgaacggaatctcagagagggggaattctacctcctggaagcagagcgggaggctgtctgtgcggcggttattatccctctttccgacaataccggcgagattaagtacctggcgacgcggcaggatttgcggggcaggggatatgccggacttctggtaaactggctgtgtgggcggtatacccagacttttacagccatgaaggcggaagtttccggcagcagactatccttttttcagaaattaggctttaccgtctgcaccgatgacaaaaatccttctcatacatattgtctgtgccgtgaacttccggtgggagaggacaggcctgaggggacgctgcgctgtgggcaggcggagatcggaacgcctgcttatcaaagtactttagagcttcggcaacgggtgatgcgtcttccgcttggactggatctctatcagggtgatatgagccgggaggaagaatttgtccattttgcggcgatggatgaaaaagacagggcatggggcgtggtggtggccgatctgaggcccgacagaactgtggaagtccgggcagcagcggtagacttgcggatccagcggtcaggctgcgggcgaaggctaatgacgatgatggaagactattgccgcagccgggggatgaaagaaataatcctccattcacggaaaacggctgccggcttctacgaacaactgggatacaccagaacacccggagaatttatagaggtcacaattcctcattgtgaaatgcggaaaatattataaattaaaaaagtctgcggaaaataaaaattccgcaggcttttttacgttaaaggcggtggaccgtgcgcggggcgtgcaggttatcgttatcggaaatttgcggcgggctgaaaggctcataattccgtctcaccaccccgtccgctggacgtcccggcggcgtcttcccctgcttaattcatcgaaatgcctccggcgccaatttcatcatatcttccgggattctcccctgctccctttcaacaacctcatataccacaacatcgggccggttctctttcagcagggaggcgtcaaacgcctgccagtggtagtaatccgtataccggaagtatttactcagtgtctgtgacagcgaatagccgaaggagtcccggtaaaccgcaatgcgcctgggatccggggcatccggtgtcacctgatgggtaatgttgccgtctccgttcacatcctcccgtgttgtgttgagttcgtcataatagccgctgatcactgccattgtgtcatcggtgcgggaggggggcatatggaataattttcccaaatcacctacgccggaaggaaggtaggataccgtcacatcctcgattgggacaggtgctccgcccagggcttcgataagcatctggtttgtcacgtaaccggcggcatcgttccagtgggtgtcggtcttgaaataccactggtaatcccggttttcggcaaaatagggggcgggatcgatgacggtcaccgtactgtgcgttctgatataggaaatcagttcctccgaccgggtaggggaggcaagctgcctgcagctgtccgggagatattccctgtaaaccgactccttgctgggagggagaacaaggataaactgaatgccctgagattcgaagtagtcggcagccgtctggatatgcgcggttatggcctgaagcacaggctcgggatagcggttgattccgaggcagtcggccagggaggaaccggcagtatagaagtaccagccgtcctttcccttcaggacttctgtggaatccgggtagtcaaacaaatccaggttcagccgggcattcagggagagaaaacggtttcggaaagcggcgtgatcattgatgtagctgtccatctcgccgggatagctctccaatgtctggaggctcaaatgaggaaagtctgccagcgcccggttttcatccgttcctgtatccgactcgttcttcataaatggatagagcaggttaggggccagaaggcacagccagaacccggcaatcataattattttcttattcataaagtaaaactccttaaatcagaactgaaaatagataaatgcggtgtaggtactgctgacaacgaccatggttgacaggaacaaaagcacaatcatcactgcaatatcgccgtaggatacgttttcttcatcaaatatatggttacggaacctgggaaacagggcctggaccgggccgcataagaggattcccaaaacggcgaggaacaggattttattatttgcgaacagtcctgcattccatagccctttagaaggccttatcatcgcctttgccaaatcgatggcgtacgtcatgctgggtgcgcgaaacagcagccagccaaagacgacgacaaccatggcgtacagatgattcaaaaatttaaccgggttgcgatccagcacttttttcagccacaaacgttcggagaggatgaaaatgccgtgatagattccccatataatgaatgtcatactggcgccgtgccacaatccggttgccaggaatacgataaaaagattaacacaggtccggccaaggccttttctgtttcctccgagagggatataaagataatccctgaaccaggttgacagggaaatatgccaccgcctccagaattcggtgatggaggaggagaggtacgggtaattaaagttttcttcataataaaagccaaagattcggccaaggccgatcgccatatcggaataacccgaaaaatcgtagtaaatctgcagggtatacaggattacggccagccaggcggtaagagtccccatctggccggagggaacgcccatgatataatcgacactctgcccgaaggtgttggccagcagcactttctttgcaagaccgtatacaaaacgtttaattccataaaactgcatggaaatggtttcgttccggtttgtgagctgtccggcgacttgatggtattttataatcggtccggaaagaatctgcgggaataaaaagaggtaaagagccatgtggaacaggtttttctgtgcagggctttttccgcggtagacatccacaacataggagattgcctggaaggtgtaaaatgagattccaagcggaagaacgatgtcgcgcagagggaacagctcttttcccgcgagacggccggctgtcgccgcaaagaagttatagtacttaaaatacccgaggattccaagggtaatcaggacaaaaacccccaccgacagcttctttagcgcggtccgctccccggcagcgtcgagacagagcccggcagcgtagcataagagcgcggtcagcagcactaaaagcagataacgcggtccgccccatccatagaagatgaggctggccgcgaaaaggacaatattttttgcgttccgtccgggagccagataataaagaaaaacggctgccggcaggaaaaaccataaaaacacaagggaactgaataacataattgtaccgccttttaaagattgtaatagttcatgctgtatgaactgttactaaagattagcctttttcacgtcaaaagacaactgaaccttgaacagatcgccgtcaatatagatttcgaaccggccgttctgaagctcggtcaggcttttggcaattgacaggccaagtccgcttccctccgtggttctggcaacatcgccgcgcacaaagcgttccgtcagctcgtcgccgcggatattcagtgggttggccgagacattcttaatcgtgaagacaacctgcgcaggaagaaggagtccctcctcgctgacggagatatctgtttttgtgatatcgatataaatacggctgctctccatcgcatatttaaatgcgttattataaaggttttccaggacacgccagagcctgcggccatctgcctcaatcaggagagtttcctccggggcggtggtgataagctcaagatgtcggctggcaaatttctcttcaaattcaccgttggtctggtaaaccaactgggtaaaattgatgtcgcttatttcgagtttcaggtttccggagcttgctttggatgcttccaccaaatcctccgtcagggttttcaggcggttggctttctgctccaacacatccaggtagcggagaatcttctcatcctgaatattttcacgccgtatcagccctacataattcataatcgaagtaagcggcgtcttaatatcatgggaaacatttgtaatcagatctgtcttcaggcgttcgctttttactttctcctgaagagctgtttccagtcccatactgatattgttgatgttggctgccagctcgtattcttttccgtcaaaatcatccaggtttacctgatagcttgtctcaccggcagacagatgttcaattgccgtactgatcatgtcatgctcaacggaatgcttgaacataagatagaatatccacaggttgaaggccgcgcaggcaaggattaccataccggtaagggcgtaaaccgccgtcttgctcagatagattctgtcccataaaaaccaggcaaggctgatcagagaggtgttaatggccgcataggccaggaagctgacagtcaggcgggttgtaaaactctggcctgtaaagaatatggacagatgttcgctccagcggcagacaaagctgccggtccatatggttcctgccttataccgtctcagcatgctgaaaaacaaaagcagggctcccagataaaagacggcggtgtagagaacacgctcggacagcgcccaggattcctccggcagaaccagatgcgcaattctgacaagcaccaggcggcagagtactaagccggccagcgtcatcagggaaaacatgacaatacccgtctccgtgcttgtcttgtcaaaaccgtgaagcgtaatcgtcttgtctccgacattcctgtgacccgataccttaagcaggaacaggagcgtgaggaccgcaatcatacctccggtcacaagaaggacaaaaccgctgatataataatgctgcatgctcaaataagcgtcccggttttccgagtagacatccacaaccggataagaggtatccacaccggcaaggaggtaaaatgttttagtatcataaggattattagccgccagtgcggaaaccgtatttaacgcaattgacttcaggtttgtatcatagaatacggaatttcccggaaggtatgcgtatttcccgtaggttttaattacatcgggcgtcagttcctggtcattggcaaaaatagtggctctcttggtgctggattcctgatcaatatattccactttaaaatgcagattgctcggatttgcaagcaggcggttgtaggtggaataatactgatggagtgattccataatttccagggagacatcttccagagtcgctctgcgcgttcccggaatcaggtagctgtaattttttttaggctcgcttgcggaccagtcaatatatccctcgcgtgttttagcctcaagggcgggagctgataccttgttacactgaaaatcttcatttaactgataccccatggtctggagataggaaatgatgtcagccaggctgaagctctccgtctcgtttggaccgaaggtcatctgaagcatcttctttgagacgtcgattgcgccgccgctctcaaaggtgggattgtattctatatattggaagatatcattcaaatccctgttaaactgacgggtaaattcgtcggtatcctcatagaccgtattctggactcgggtgataccgatgccgaagttatcgttcagatacatggtgccgatacctgcgaacatcactgtcagaaagattaggtgcagggcgctggcaatcagtttttgagcctgcatggatagccgagaaaatttcatattatcacctgttctgtattataactactgtttctcaattttatagccgactccccatacaaccttgagatacctgggttctctcggattaatctcaattttttcccggatatggcggatatggacggcaaccgtattgtcggcgccgatcgcctcctcattccagatttcctcgtaaatctgatcaatggagaatacttttcctgcattccggacgagaagcagcaggatattgtattcgatgggagtcagtttaatcagttctccatccaccgtaacttccttgttttcatcgttgatcaggagacctccgcatttaaagatatgtccgcccgcctgggtattcatattgccaagctgcgtatagcggcgaagctgggatttcaccctggctaccagttccagcggattaaacggctttgttatgtaatcgtccgcaccgatattcaatcccaggattttatcggcgtcctcggatttggcagataaaatgataatcgggatactgctggtttcgcggactttgagcgtcgtgcggataccatccagtcccggcatcatcacatctataatcatcaggttcacactgtggttctgcaaaagctccagagcctcgaatccatcgtaggccttaattacttcaaacccttcacctgtcaggtaaatatctatcgcttccacaatctgtttatcatcatcacaaacgagtatactctgcatggctgaccctccttataggcacacttttcttcattatacaacggattagagaaaaaaggatattactttttccttaaatggagatttaactgaggttgggaggacgcgtccggaacggaccatgtccggtgtggtgagggggccggctgagtcttccgtccccgtgggaagttggtcgtggagggggaatccggccggaatggattgctgcggggaccgtttgcactctttggagtgcgaggcagtgctaagctcgtgagggacctcgctaagcaccggcggactcccatgtcccctccgcaattgattccgcctacttccccggtccaggttttcatcggggacggaagactcaggcgaaggttttcacggcaccggacccggtccgttccggccgctgattgtctccaaccttaaatggggagggccttgtcgcggccactgcgtgtttccggcaggccgatatcaaatctagcgccttttataaaggcgcaatgaaggcatatcgtatttcccgcacacgaaagcgctgagtggtctcgacaaggtccgccctccgcacttaacgcgtgagacaatcagcggccgcaggccggcggacggggccgatacacccggcggagtctttcgtcccggcgaaaacctggccttggggcggaggggaagataaagtctgcggatgccattgaaatccatcgctgattagcgaggtcctgccgagcttagcagcgcgatgcatttcacagagcgggagcgtgctccgcagactttatcttcgcccgcagccccacaccacaacaatcctcccccgggacgaaagactcatatacacccccaccaccccgtccgctggccgtaccggcggcgtcctcacctgcttaactaaatcccgtgggaaaatggcgaaattccgcgaaaagttattcttgacaaaaagagggagattcgatacactgtgaatagtttgaatatcaaaacatttgaaaccaaaagtaataatcggggataaaatatgacttcaagaataatcggaatcggctcctatttgccggaaaacattgtgacgaatacagatttgacagaatttattgataccagcgacgagtggattcgcgaaagaagcggtatctgtgcccgccgcatctctacggaagagggtacatcagccctggcggtcaaggctgcaaagagggcgattgaggatgcggggattgccccggaggaaattgagattatcgtgctggcgacttcttcaccggacagggcttttccaagcgccgccacagatgtacaggcggctgtcgggccttgaatgcggttgcctttgatattaccgccgcctgctccggatttatctacggcatgcatattgtgcagggctttatcaagtccggaatctataagacagggcttgtaatcggcgcggagacgctgggcaaggttctggactggacggaccgcggcacctgtttcctttttggcgacggcgccggtgcagctgttgtgagagctgatgagagaggattgattgacacgctggtaggcagcgacggcagaaagggctgggtgcttgactgccaggccagaagccttggcaattgtctgacaaagacgaaaccggaactgggatttatgcagatggacggccaggaggttttcaaatttgcagtccgcaaggtgccggaaatcactaaaaaaattatggaagataatggagtgtcacaggaagatatccgctactttgttcttcatcaggccaattacagaattctggaggcagtgtccagacgtctaaacattccaatggagaaaataccggttaacctggatcaatacggcaacacttccgcagcatccatccctgtactgctggatgaaatgcacagggacggccggctggaacgcggcgacaggattgtactgtcgggattcggagccggactcacctggggagccatgcttctcgaatggtaacgcagaaacttctgccataagattgacaaaaagccgcagaccgggcattatggacagtggctttgtatataaaagcaaatctaaaattaaaaaatagtaaaaggagacaaggattatgttagagagaatgaaagagatgattgcagaccagttaagcgtagaggcagagattattacagaggcctcttccttcaaagatgacctgggagcagattccctggatctttttgaattagtaatggctctggaagacgagtattctgtggaaattccggcagaagacttacagaatcttttaactgtaggcgacgtaatgaattacttaaaagaaaaaggtgttgaagcataatgaagacaagagtaacagcactcttagggattgaatatccaatcatccagggcggtatggcctgggtggcagaacataatctggcggcggcagtatcagaggcgggcggtctcggtcttattggaggcgccaacgctccgggtgaagtggtgcgcgaagagattaggaaagccagagaactgacggataagccgtttggtgtaaacgtcatgttaatgagtccttttgccgacgatgtggcgaaggtagttgtggaagagggaatcaaggttgtcacaaccggggcaggcaatccaggcaaatacatggaaatgtggaaaaacgcaggaatcaaggtcatccctgtagtcgcctccgtagcccttgccagaatgatggaaaagggcggagccgatgccgtagtggcagagggaacagaatccggaggccacatcggcgatcagacgacgatgagcctggtcccccaggttgcggacgccgtttccataccggtaattgcagccggaggaatcgcagacggaagaggaattgcagccgctttcatgctgggagccgaggcagtacagatggggacccgttttgtagtggcgaaggagtccattgtacatcagaattacaaagacagaattatcaaggcgaaagacatcgattccgcggtaacgggacgcagccacggccatcccatcagaagtctgaggaatcagatgacgagagaatatctcaagatggagcaggaaggcagaccgtttgaggaactggaatacctgaccatgggcactctcagaaaagcagtcatggagggtgatgtcatgcacggaaccgttatggccggccagatcgcgggtatggtaaagaaagaacagacctgtaaagagatgatcagtgagatgacggctgaagctgagaagctcctgtcaggaacttccttccgttagtaaaatagcggtgaagagccgggataacggcttttcaccgttcaattaaataatgaagaaatacgaatcagaatgatacagcaggaattaaaagatagaagttaggataagttgggagcgaggtaacgctatgagcaaaattgcatttattttcccgggccagggagcacagatatgcggtatgggccaggacttttatgagcagactgagacggcaaaagagatttttgacaaggcatccgaaatactcgggttctccatgccggaactctgttttgagaagaatgacagactggatatcactgagtacacacagccggccatggttacggccagcatcgcaatgatgaaggttttcatggagcgcacggggattactccttcagtggcagccggtttaagtctgggggaatatcctgcaatggcggcagcaggcgttatgtcggctgaagatgcaatacggaccgtaaggcagaggggaatcctgatgcaggaggctgtcccggccggagtcggagcgatgtcggccgtgctggctatggacggagagaagattgaagaggtgattgcaccgattgacggtgtacagattgccaactacaattgtccggggcagattgtaatatccggcaaaaaagaggcggtcgatgaggctgccgtgaaattaaaagaggcgggcgccaagagggtgcttccgttaaatgtaagcgggccgttccactccagtctgctcgaggaagcaggagagaagctgggcgaggtgctggcacaggtggaagtacataccccggttattccttatatcgccaatgtgacggcgggatatgtgaccgatgcaggtgatgtaaagcctctccttatcaaacaggtatcctcctccgtacgctgggaacagagcatccgcaggatgctggaagacggagtggacacatttattgaaatcggcccgggcaggacactgaccggtttcatgaagaagattgaccgaaacgcgaaagcgatgaatatagaaaagctggaagatattgagaaagtgaaggaggcgttaggatgttaaatgataagattgcagtcgtgacaggcgccagccggggaatcggcaggcagatagctcttaccatggctaaggaaggcgcagccgtgattgtaaattataacggttcagccgccggtgcagaagcagttgtgaaggaaatctgcgaggccggaggccaggctgaggcggtgcagtgcaacgtatccgactatgcgaaggcagaggaatttctcaaatatgtgatcggcaaatataagaggattgacatccttgtaaacaatgcgggaattacgaaagacaacctgctgatgaagatgagtgaagaagaattcgacgcggtaatcgacatcaatttaaaaggcacattcaactgtatcaaacatgtatcacgccagatgctcaaacagaggggcggacggattatcaatatctcctccgtatccggagtgatgggaaatgcaggccaggcaaattactgtgcatccaaagcaggcattattgggctgaccaaagcggtggcaagggaactgggcagccgcgggattacggtgaatgcaattgcccccggctttatcgacacggagatgacagcagtgcttccggacagcgtaaaagaagcgatgggagagcagattccgttaaagagatttggcaggacggaagatgtggcggatatggcggcttatcttgcatcagataaagcaggttatatcacgggccaggtgatctgtgtggacggcggaatggcgatgtaaggcagagctgtgacaaggcggaagtataaatatattaagaagaaaggcgaatgcgctatgaataataatacaagagtagtcgtaacaggaatgggtgctgtcaccccgatcggcaatgatgtagaaaccttctgggaagggctgaaggccggaaaaaaaggttttggaccgattacttatttcgatacaagtgattttaagtcgaaaatcgcggctcaggtgaaagactttaacgcgaaagaatacatggatccgaaggcagcccgcagaatggagacattttcccagtatgcggtggcggccgcttcccaggccctggctcagtccggcattgatatggctcaagaggatccgtataaggttggaatcagcatcggctccggtatcggcagccttcaggcaattgaaagagaatatacgaaaatgaaagacaaagggccgggccgcgtcaatccgctgcttgttccgctgatgatcagcaatatggcgacgggcaacgtatccattcagttcggtttaaagggcaagagcatcaatgtggtgacggcctgcgcgacgggaacccattccatcggagaggcgttccgggctatccagcacggtgaagccgacgtcatggttgcgggcggcgccgaggcatgtatcacacctctgggcgtagccggattcacggctttgacggctctttcaggcaatgaggatcctgagacggcttccagacccttcgacaaagaccgcgacggctttgtaatgggagaaggttccggcgttgtggttcttgaatctctggagcatgcgcagaacagaggcgcaaagattcttgcggagcttgtgggatacggcgctaccagcgatgcctaccatatcacatccccggcggaagacggaagcggagcggctaaagcaatggaatttgcgatgaacgatgccgggattgtgccggagcagattgactatgtaaatgcccacggaaccagcacccaccacaatgacctttttgagacaatggccatcaagctggcgctgggcgagcacgcatataaagtgaagatcaactccacaaaatccatgataggccatcttctgggcgcagcgggcggcgtggaattcattacctgcgtaaaatccgttatgaatgattttgtccacgctacggtcggcttaaaagagccgggcgagggctgcgatctggattacacaatgggtgaaggcgtatccacaccggtaaattatgctgccagcaattctctgggattcggcggacataatgccactttgattgtaaagaaatttgaagcataggatgttacttaattgctgttcgcagaaccgtatccgaacggttacaaagaatcagaaatagaatgaggttcaatatggaaataaacgatatcttaaaactaatagaagcagtttccgagcatggtcttaccagctttgtcctggaggagaacggttccaaaatctctatgaaaaaggaaaaggaagtaataaccgttacggcggccccggcggtgcagacggtaattgcgcccgcggcggccgatgcccgggatatttccggcacagcgccttccgtcccggcaggttatatggcgcctgcagtttctgcggcgggaacagaaatgtcacgctcagagtccatcggatccgataaggtagtgacctctccgctggtaggaaccttttataatgctgcgtcacctgattcagacgcattcgtatcggtcggcgatacggttaaaaagggccaggttctcgggatcatcgaggcgatgaagctgatgaatgagatagagagtgagtacgacggagtggttgaggcggttctcgtaaataatgaggaggtcgtagagtacggccagccgttattccgaatcagataatcggcggacagacaatagccggaaagaaggtagaatatgttaggaatcaaggaaattcaggagattattccgcaccgccatccgttccttctcatcgattgcatcgaggaggtaacgcccggagagggagcggttggatataaatcagttacttacaacgagccgttttttgccggccactttccgcaggagccggttatgccgggcgtgctgattgtggaggccctggcacaggtcggtgcagttgctatcctgagccaggaagaaaataaaggcaaggttgcctatttcggggctattaacagcgccaaattcaagaaaaaagtggttcccggcgataagcttcggctggaatgccatattatcaaacgcaagggaccggtcggaatcggaagtgcgaccgcgacggtagacggtaaggttgccgtaatagcagaattaacatttatgattggataggtgaaggccgatgtttaacaagattttgattgcaaaccggggagaaatcgcagtgcgtatcatccgggcgtgcagagaaatgggaatagaaacggtagccgtttattcggaagccgacagggattcgcttcacacgcttctggcggatgaggccatctgtatcggaccggcgccgtccacggagagttatctggatatggagcgcattatctccgccacggtagcgatgaaagcggatgccatacatccgggattcggctttctctcagagaacgccaggtttgcagagctttgtgcaaaatgcaacatcaaatttatcggaccttcggcagatatcattaataagatgggcaataagtcggaagccaggaagacgatgatggaggccggggttccggttgtaccgggcagcaaggagcctgtttatactgcaaaagaagcccttgtgcttgcacagtccgtcggatttccggttatgattaaagcatcctccggcggcggcggaaagggaatgaggatttcccggggcgcggaggattttgaagcgaactttaaccaggcccagatggaatccgtcaagggattttcggacgatacgatgtacattgaaaagtatattgagcagccgaggcatatcgaattccagatattggccgattcatacggaaatgtggttcatctgggggagcgcgactgctctatccagagaaggcatcagaaggttctggaggaatcgccgtcagtcgccatctcggatgatttgagaagacgcatgggcgagacagccgttaaagcggccaaagcagtgggttatgtcaatgccggaaccatcgaatttctgctggataaaaataaagagttttattttatggagatgaatacccgtatccaggtagagcatccggttacggaggctgtcacggatatggacttgataaaggagcagattaagattgcagcgggcgaggcgctttcttttacccaggaagatgtggtaatcaggggccatgccatcgaatgccgaattaatgcggagaatccgggaaagaactttatgccgtgtcctggccgcattatcaacgtccatgtgccgggcggcaggggagtcagaattgacactgcgatttataatgactacaaagttccgccgaattatgattccatgcttttaaagcttattgtccatgataaagacagggagtctgccattgcgaagatgcgcagcgcccttggagagctggtgattgaaggaatcgaaacaaatctggatttccagtatgagattctgagcaatgaagcatatcagaaagggaaaattgacacggactttatcccgaaatatttcccgcagtattgtaagtaaatagtaatggtaaataaccatcagttccgtctaagaaggggagagtgcctatgttaagagatatgtttaagaaaacgtataccttaatcgatacgaaatatgcagacaaggctgaggacagccggtcggaaaacggggaagaacccaatgtcccgaagggattatggcgcaaatgcaacaaatgcggccgcccaatctacacagaggatgttaaaaataattattatgtctgcccgaagtgcagcggctacttccgtatccatgcatacagacgtattgaaatgctcatagacgagggtaccttcgaggaatgggataaagagatggagtttgtaaatcctctcgctttccccggatatgagaaaaaaatcagtgcagtgaaagaaaaatcaggcatggatgaggcggttgtgacaggccgcggcaaaatctacggacaggatgcggtaattgcagtctgtgattccaggttcctgatgagcagcatggggcataatgtgggagagaagattgcaagagccgtggagcgtgcaacctgtgagagactgccggttgtcatatttgctgcgtccggcgggccagaatgcaggaagggcttgtttccctgatgcagatggcaaagacctccgcagccctcaagcgacatcacgaggccggccagctctatgtgagcgtcctgaccgatccgacgacaggaggcgtcaccgccagctttgcaatgctgggcgacattatactggctgagccgggcgctttgattggatttgccggcccgagggtaattgagcagacgatccgccagaagctgccggaaggcttccagagggcggagttccttctggagcatggttttgtggatcggattgtggagcgtaaagatcagaaagaggtaatcgcacggattctcagaatgcataatgggaagaagagctggcaaaaagagatggacgaagcggagcgcatgcgtgaaactgcggccagggtctgtgccagggaagcggccggacttgcaggggggaaaccccgcggcccgattgcgccgttttcaggtgagatgagagtaaagacgctgaataagatagctgacaggcagcaggaggcttgggatacggtacttcagtcgagaagcggtgaccgtcttgtgtccagtgattacatccgagtcttatttgataattttatggagatgcacggcgaccgctactatggagatgacggtgcagtgatcggcggaattgccaccttttacgggatgccggttacggtcatcggccaggaaaagggaaaaacgaccaaagataatttaaaatgcaacttcggcatgccgtcaccggaaggctacagaaaggccctccgcctgatgaaacaggcggaaaagttcaaccgtccggttatctgttttgtagacacgccgggagccttctgcggactggaagccgaggagagaggacagggggaggccatcgccagaaacctgtttgagatgtccgacttaaaggttccgattctgacgattgtaatcggggaaggcggaagcggcggcgctcttgcccttgcagtggcaaatgaggtttggatgatggaaaattccgtctattccgtcctgtcgccggaaggatttgcctccatcttgtggaaggacagcaagagggccagtgaagcggcaaaagtgatgaagatgacggcaaaagacctctatgagctgggactgattgaacggattattgccgaggatctgccggctacggcggagaccgcggaaatagtcggagaaattattgaccgccatatgagagagttctttaagacctgcgaaatcatgacgccggaagagattgtcagccagagatatgacaggttcaggggattttaataatagttaaaaacaggataggagaaatagaatgtgtaatttaaaaccgttgaaaataggcaatctgaccgccaagcttcctattattcagggagggatgggcgtcggaatcagtctctcttccctggccggggccgtagcgaaagaaggcggaatcggtatcatatcaacggcgcagattggttttcgggagccggattttgctgaggattcccagacggccaatttaagggctatcgggaaggaatttaaaaaggcaagggagatttcaccggacggtgtgatcggatttaatattatggtggctacccgcaattatgcggagtatgttaaggcagcggtgaaggccggagccgatttgattatctccggggccggtctgcccattaaccttccagaatacgtgaaaggatcggctacgaaaatagcaccaatcgtttcttctgtaaaatcagcgatggtaatctgtaagatgtgggacagaaaatataagacagcgccggatctggtagtcgtagagggaccgctggcaggcggccatctgggctttgacagagaaaaactcacatacctgggcgtagacacggagcatgcgggagataccttcaaaaaagcggagtatgatgacgagataaagggcatcatcgcccttgtcagggaatacgcgcagaagtacaagaaagagattcccgttgtaacggcaggaggaatctattcccatgaagatgtgatgcaccagctggaactcggggctgacggtgttcaggtggcaacccgtttcgtgacaacggaagaatgcgatgctccgatggagtataaacaggcgtatctggatgcaaaagaagaggatattattattgtgaaaagccctgtggggatgccgggacgcgcaatccgcaaccattttctgcgggaggtggagaaaggcagacaggcgatttcacattgttaccggtgcctggagaaatgtgatcaggctaaaataccttactgtatcacgcaggcccttgtcaacgcagtgaccggggacgagaacaatgctctgatcttctgcggcagcaatgcgtggaaggcggacaggattgagaccgtacaccaggtgatgcaggatttgtgccggggctgaccttccggaaccaaacggaggggaaagaagacagaaattagaagatagaaaatagaagataaacgagaacagataaaagaacgcagcggccatggtttcctgccggtctggcaacaggcaggatcccacggcggctgcgctcttttgtattcttatcctctgaatctgttaaggcaggcatatatctcctgaacccttggcatacataaccccattgcagtatagttcgagccgttaaaggcagccagtcccttcttctcatattcgagcatgagaatgtccacggtttctttcagcgtgcagcgtgaaaataatccgcgttcaaggcagaagcgtaccatttgggccagggccgctgtctgttcgctgtcggccagctgttcgacgaaacggagatcgacaggctctttgcccacctgaaatgaatccctgccgaatattttcaccttaatccggtcgtcctgttttctgttgccccgtctgtcgccggaatttgcacctccccgtccgctgtcggagcttgctgcaggggcgggcagctttcttcctggcttgggaagagaaaacccgggcgccgtcagggcaggcgaggaaatctcccgataagcctcacaggctttctttacctgttccgtaatgtcgagggggcggtaagaatccatctgaattaccgtatccgcgatatagaagtaagcgcctgagcttccggctaccagtaccgtggagataccggctttttcatagagatctctcgctctctctatgaacggagtgattggttctttatccctgctgacaattttctgcatcagctcatcccggagcataaaattggtggcggaggtgtcctcgtcaatcagaaaggcggcagcgcctgcctcaattccttctataacagccgcggcctgggaagtgctgccgctggcatctgccgatgagaaacgggaggtatccctgccgtttggcagatcgttgataaacagggagatgtcgacattactgatgctgcgtccgtcctctgcccgcagtttaacggccgtactgtccgtaatgacgtattcccggccgtcaccggcgatatgattgtacacaccggcctccagagcctttaaaagggtggatttgccgtgataaccgccaccgactatcagtgttatgcctctgcggactgccatgccgcaaagggggccgtggtgcggcagattcagtgttattttcagggactcggggaagaaaagggtacgcttcctttcatcgggcggtccgatatgcctgtttcacgggcaggacggagccgtcggcggcaaaggaaacgagatccaggcgtttcagctcgtttctgataaactcctggtcttccgccagctcaatgacgtcacgcacctgtttcgggttcctgtttttatacataaagacatttctgacgcatccgggcagaaaatcaaacaggattttgatgagctctcccgaatttatcgttcttccaaaagccgggaagccgacttcaaagcgggcggtgattccggttccggtacattcacaggccgagcgggtgagaacctcctgtcccggtctgcttgtagcgatcagtccgcttttgccggagccttttgctttaaaattaaatcgtgcaatttcctggctgaaacaacgcagcagataatcctccagtgccgttttcttccattggcggtcataatatccttcgggaaatgcgttgatcttatgtgggataaatacgctgaccttggagggggaggcaaagggatcccctgaacatggtctaccgtcaagatgtagtctttaaaatcataggaaccctgaaccgctttataagcggggtagcctttatggtcgatggattccagcagtctttttaaatcctgagaatgattcatggtattttccttttctgttcttgattaatactgtgctgacaggtttgccggtgtgctggcagtcagcttttattgagtattttaattcattcgatgggaattggcaagtgtatggaagattatctgctgctgataatatggtttgttactattcacggcccatattccgcgaggtattttcgtgcgtattttgcacgaaaatcccgagttgcacggctcgacgcgatgaaaagtaaatttttcaccacaatcaacggcgttttttgccgtttctgtgcatcgcggaacgtgttactgttcgcggagctgcgctttttcagcagggccgtgaatagtaactatggttttatttttccgggagatggagagagaatgcgctaaggcagtaaacagggaaaattgcggggagggcggtaacatatccggccgttttgtctcatatattaagaacaagcgatattagtaggaagtagatttatgctgaattatctctgggcatttatgatgctggtcggaattctatgggcggctctgcacggcaacctggcgcaggtaacgaccggagcgctggattctgccagagaggcagttacgctttgtattaccatgctgggcgttatgtcattttggacggggattttagaggtgggtaggagagccggactgattgaacagctgtcgcggaaaatgacgccggttctacggttcctgtttccgggcataccgaaaggccatccggcgctggaatctatttcggccaatatgatcgccaatatgctggggctcggatgggcggcaactccggccgggctgcaggcgatggaagaactggaaggcctggaggaagaaagacggagggaaggaaaaaaattcgtgcctcagggggttgcaagcaatgaaatgtgtacatttttgattatcaacatatcatcgctgcagcttattccaatcaacatgattgcctacaggacccagtatggcagtatcaatcccactgcaattgttggtcctgctctggtggcgacaaccgtcagcacgatcgtggcggcaatatattgtaaatggaaaaacagaaagcggagctgacggctccgctttctgagtgattgatggcggtgacctgtgcagagcgtgcaggttatcattgaagacaacggcctgtgcgcagagcgagcaggttatcgttccggttcaaggcgctccgcccttgactttcggtgtgaaaaatatagtttatccaagcttatccgcccattccggctctttaaatccgaccagaacgaaatcctttgccacaatcaacggacgtttaaccagcattccgtcctccgccagcaggtcgtactgctcttcttcgctcaaagaaggcagtttttcttttaagttcatatttttatagagaaggccgctggtattaaagaattttttcagcggaagaccacttttctgatgccacagttttaattctccggcagtcggattcttttcttttatatggcgggattcatatgatacattatggctgtccagccatttctttgccttctggcaggtggaacagggaggatattctaaaaacagcactttcataataaaaaatctcctttctcagattaaggtgcatggaaacatggagtctccgacggaaatcagcgccggatttctgcggtgagcgcagaaaccgtttatgcgcaggtataataaccgctctgcggtcattataccataagaatggttttttgacagatgaatgtaatttatgggacaggtttcacattatggtcacaagtctcatatataatcattctcgaataatatgattttatcagtatggaaggaggcctgggcgaataaaatagaagtaataacggcttcatcaggagcattgaatgaaatttattctgtacatatccgaatacctggttccaattattattttttacattgccggctttgcatttctttctaagaggccggtattcgatgactttattgaaggtgcaaagcaggggatgaaaacggttgcagaaattctcccgacgctgattggtctgatgacggcagtcggtgtgctgcgcgcctccggatttcttgattttctgtccggtttattggagaaaccggcttccctttttcacattccggcacagattgtacccgttattttagtgcgcctggtatccagctcggcggcaaccggtcttttgctggatatattcaaaacctccggcccggattcctatgtcgggatgatggtgtcaatactggaaagctgtacggaaactgtattttatactatgagtgtttactttatgacggcaaaggtaacgaagacaagatggacgtttgcaggagcgatgctggccaccggggcaggggttgcggcaagcataatcctggcgtctgtcggatgaaagaccggaaaagaatggaaaaatgccattttttgtaagaattttgacggttgttttgacagggagaatattgtataatcagttagtacgcggatcaatacgcgaaaactatgaaatgaaagggaatgccgtggatcattacgagactctcaatgaagtgctggtaaagctgttccgtgatattatggatatcgagcaaaaagctataataacacaggaatttaaggatatcaccaataatgatatgcatgtaatagaagcgattgggatcgaagctccgaaaaatatgtcctctatcgccagagagctgtcagtgacggtgggtacccttacaattgcaatgaacagtcttgtaaagaaaggctatgtggagagaacacgcggcctggaagacaggagggtcgtgtatatatccctttcagaaaaaggcagaaaagcttacgggcatcatgcccagttccacaaggaaatgataaacagcgtaaccagcgagcttaccaaagatgagctggagactttgataacagcattgtccaagctgagaaactggtttgaccactggaaagagtagaatacgaggaggcatcacgcaattatgaagagatttatggtagtattaaccggtgtcattatggcggcagcactggccgcatgtacgccgactaaacagagcagcgaaaagagaaataatccgccggccggagccacacaggagtcctctgttgacggagcgcttgagaaacaggagatggtagtggatgcagaaccatcggtcacggtctgcatttactctgtgaatgataataagacaggtctgaagcagaatatggatgccgttgacggcgaggaactggatgcgcagctgttgatagacaagatggcagaactgggagtgattgaagaaggcgttaaggtcaagagctttgacaataaagacggtgttctgacactggacttatccgctctttccggttccaaggatgaattggtcattacatcgattgttaacacatttatccagaactatgaagcggaagagatgtccctgagcgtaaatggtgagaagctgggaagcggtaattataagttcgtcaaggaatataaaaagatgaaataaaatttacagagataaaatagagaaaaaagggtttcactgaatgttacttcggtgaaaccctttttttaattcgtcacgtcataagtcaggagccaggtctcgaaatagggtttaataacccggaaggaagctccctccatatctaaaataaatttgtggaacgctttgggcgaataacggttaccaagcgttttcttcgctgaatccctcagggtgcagatctccagataaccggtataatatttcaggtaatttccaggattgtcaatgatggaatgaaacatttcctcgcaaacctcagcatcggaaatcccataatacgtttgcaggaaaccggataccttctccaaatcccagccgtcatagtgaatatggatatccagcagcgcatacagcgcataaatagatgcctggctgcgtgccatcagttctttcatatcaggagatagtccattgtcgaaagagtaactgtacagttcacagtaaagtccccatccctcatcatatccgccgcaggagaggatatggcgcaggggacagctctgcttcctgttaaagtagacggactggtataggtggcccggataaccttcgtgggccagaaccgaatacaaatcagtaccttcttccctggatttgtcattgatgtaaattacattagtggtatccgaatcgatcggcgggatcaggaaaaatgcaggtgacagcgaagattcaagtgctttgggcacatgtttaacctcataggtggagtctgtcagttccggaaaatccgtttttatctgttcacgcagatggtccagaatctccaccggttcactcagagagaagctcgtgcgttcaatctcctgaaccagcgccggattattttgaagtaatttcgctgtttccgccatatcgcttccaaatttcttttcaatcctgtttttaagctccggaatggaactgtcggtaccggtcagggtagcgaccagatattcgtaataagctttgcctttctcatagtggcaaagaccattttcatttgtccctctgccttttaactcttccaatgctttggacaaggttgtgtaggccggaataaagtgttcttttaaaatctggagatgctttgtcttataagctgttttctcatcctctgtcaggccctccacttcatccagacggctgttaaaggtttccgtcaggaagctgttttccggccggatcagataatccttgcaggattggagcatacggtcaatggttatatcgcttggggccaatccggcgtcggccatttccttctcataggcggccagttgtccatagtagacgtcgatctgtgaaagaagctccaggtaatgctctatatcggtcttgtcgtaaaaagtatattcggccagtagtaccggaagctgggcctgagttccgatcagcgggctcaggggctggctgtaaagctcaaggccctttgaagagagggcaatctccagtgagtcctccagcatcttgtaggtgaaaagctgatcggacgtgagcagcgacggatcgaaggcttcaagctctttcagcagttcctcattatctttagtatcctgctccagttctgatttagatatagtctggaattttatctccggtgtttcaattccgtagttttcagggtgtctgaccataaagtggagattgagaggatcagaaccgataatttcccggaaaacacgatcggtaaaagtattaaattcagcctggacagtggctgcatctttgccgctgttcttgtctgtctgcccgccttctccgttaccgccctcttcctgcccgggcagttgcaccggctgcgtttcggatgactgaaaggattccaccggcggattataacgggaacagccgctgagcataattgcggtcgcaaggaccagcagatagtataaacaggttttacgtgccttcattttttacctccaattgcctactattataatttatattaacggagattacaacttatcaattaaattgagatttagttaagcaggtgaggacgccgccgcaggccagcggacggggtggtgggattgttttatgggtctttcgtcccggaagtttggcatcgctggatggagaaggagatactgtggttttgttttcgcagggcggagccggagagaatgatatccggctggactgcttcttcgagggatagctctaagacagaggaaggcaaagcccccggggttacggacaaattcgctccgaactccgaatgagttcgaagctcaagttgtcccggattttgcccttgtagggctaaaatccgcccggcgcgctttgtctccctctgcctaagagctatcatctctcgggcgaacgtccttccggatatcattctctccttctccgccggaagatgtcggcagtatctccttctcccggaaggttttcgccgggacgaaagactccgccaagtgtatcagccccgtccactggcctgcggccgctgaatgtctcacgcgttaagtgcgggggcggaccttgtcgcggccactcagcgctaccgtgtacgggaaatacgatatgccttttataaaaaattgtggaggatttgatatcagcctgccggaaacatgtagtagccgcgacaaggccctctccatttaaggttggagacaatcagcgcccggaacggaccatgtccggtgtcgaaaacctccgcctgagtgttccgtccccggtgaaaaactgacccggggaagtaggcggaatcaattgcggaggggacatgggagtccgccggtgcttggcgaggtccctcacgagcttagcattccgatgcgcactccaaagagtgcaaacggtccccgcagcaattcattccggccggattccccctccacgaccaacctcccacggggacggaagactcagccagcctcctcaccacaccggacatggtccgttccggacgcgtcctcctaacctccgttaaatctccatttgccacaccccccaatatatgataaaataaaaaaacttatagaaaaaaaggagtacacaaatgaaaagagagcatttgttttccctggattttgtacgggtgcttgcggccgtgatgatcgttattttccattacaatgcggttactcttatgatcccggaagtcaataaaccgatacttttatttgtccactatgccaacggaagtatgggacatatcggtgtttccctgttctttattctggcgggagcgtccctgatgtattcttcgatggagaaactcgatttaaaacagtattttaaaaaacgttttctcgctatattcccaatttactggacggtttattcggcttttttgtatataattatctgattaaaagagtattcaccttcgataagccgttatggaggctgctgctcagcgtaattggtatggatgggtatctgaattacctgattcccaactattatcttttgggagaatggtttatcggctgtattctcctgatttacctgatgtttcctttcctgcgcaaatgtatgctcagatggccggtgcttacccctgtggcagtcggtatgatctatgttccgctcacgctgttttatccgtttcagatggatatccagttctttttccttctcagggtgccggaagtgctgttcgggatgtattttataaaatatttgtatggaacgaaacagcagagggaaaaatataactggaaatggggattgtgttcgtttgcggccgtttgtacggtaatgacgattaagacgtcaattccggtgccgtttaaaatcctctggaccgggatacctattttccttttccttgtctgggccggccagctaatccggaatgcggttgtaaggaaggggatttcaatttttgcatcatatacgttcgccatatatctggttcaccatatcctggtgggaaaatttgtgtttcctcttgcgggcaggccggtggggcgtctggagaattacctggtttttggaaaatattttttgtttatcagcgtggtcggcctggtattttactggttgagccggattttaacgcaggttgtgacccttttcatccgggttttaaggaatccttcttgacaaaaaggagcgaaaccgctagactaaacctatgttggaaaatcaagcatagaactgtataatacaaaggctgtgaagagaagagtacgcagaaagaatgattacagagagtccggatgggtggaaacggatgtcaggagaactgccgaagatggtctcggagctgcactgccgaagtatgaacgggattgaagcatggcctgcaggccgcctgttcattttaagcagtgacggaaataaggtccgttaacaccgcaggctgtgaatacgcagtgcatcgccaggagcagagccgggatgcagattgctggagacagccgctgaggcatccgctgtgaggcggcatgcaaattaaagtggtaacacgggaaaataagtctcgtctttaacggtgaattaatcacctttaaagacgatttttttatttaacaggagaactttcctgttaaataaaaaccgctccgcggaggagcgcactgcggcggcagagaaatatgtaaaattataatcattacaggaggaacaaatctatgtgccggaattgcaaaaaaccatattatataacaacggcaatcgcctatacgtcgggcaagccgcatatcggcaatacctatgaaattgtcctggcagacagtattgccagatataaaagggagcagggctttgacgtccgtttccagactggtacggacgaacacggtcagaaaatagaactgaaggctgaggaagccggagttacgccgcaggaatttgttgacggtgtggctgcccagattaagtcaatctgggatttgatgaatacgtcttatgacaaatttatccgtactacagacaaagagcatgaggaacaggtacagaaaatctttaaaaagctctatgacaaaggtgatatttataaaggacattatgagggactttactgtacgccgtgtgaatccttctggacgtcgtcccaggtaacggacggcaaatgtccggactgcggacgcccggtcgttccggccaaggaagaggcatatttctttaaaatgagtaaatacgcccagcagttaattgatcatatcaatgagcatccggagtttatacagccggtatcccgtaaaaatgagatgatgaacaacttcctgcttccgggacttcaggatctctgtgtatcccgtacttcatttaagtggggaattcctgtatcctttgatccgaagcatgttacctatgtatggctggatgcgcttacgaactatatcacaggtttgggatacgattgtgacggtaaccacggagaattatttggaaaatactggccggcggatttacatctgatcggcaaggatatcatccgtttccacacaatttactggccgatcttcctgatggctctggagcttccgcttcccaagcaggtattcggccatccatggcttttacagggcgacggcaagatgagcaaatccaaaggcaatgtgctttatgccgatacgctggtagactttttcggagtggatgccgttcgctattttgttctccatgagatgccgtttgagaacgacggagttatctcctgggaactcatggtagagcgtatgaattccgatctggcaaacatccttggaaatctggtgaacagaacgatatccatgagcaataaatactttggaggcgaagtggcggataaaggagccgtgggtgaggcagatgctgacctgaaggcgactgttctggaagcggtgaagcgggtggatgagaagatggataagctgcgtgtggcagatgccatcacggaaatcttcggaatcttcagaagaagcaataaatatatcgatgagaccatgccctggacactggctaaggatgaggctcagaaagaccgccttgccacggtgctttataatctgacggaggcgattacaatcggagcttccctgttatattcgtttatgccggagacggcagagaagattctggcgcagttaaatacgcagaagagaacgctggaggagatggggacattcggtctttacccttcaggcggtaaagtgacggataaacctgaaattctttttgcacgtatggacgtaaaagaggttttggaaaaggtagaggccatgagagctgccgaagaggtaccggcagaggaagagacaaaagaggatgagaatgtgattgatctggaagcaaaacctgagatcacatatgatgattttgcaaagctccagttccagataggtgaaattattgcctgcgaagccgttccgaaatcgaagaaactgttatgctcccaggtcagggtgggcagccgggtaagacagatattaagcggtatcaaggcaaactacacaccggaagagatggtcgggaagaaggtcatggttgtgactaatttaaaaccggctaagctggcgggaatgctgtcggagggaatgctgctctgtgcagaagacagcgagggtaatcttgcactgatgaggccggagaaggatatgccgtccggagccgaaatctgttaagaaaccggatatggatttttgcaggaattgcaatcggctggtgatttgccccgcccggagatatggtttccggacggggccttgctctatccggaaactggccggacaggagaggagacggttaaatggcggagaaaaagacagcccttgaaaaggaatgggaatcgtttctgagacgcgagaagaaactgctcagaaaatatggcagaagaaaagagcctctattggaacgaaaattgcagaaagcagttccggacggcttgagcgaaaaactggaagccgcgttttaccgggcattctgcatgattttggaaaatggaacggcggcaattgagaagacttttcccaaagacaggctggaagcggaatataagacgagggaatatgccggaacggtttatccggtgagaaagaacctggcggcgggccggaaactggcggccaggaatgcggctgccggggtggctggagcctgtgcagagggggcggtgctgggccttctggggattggccttcccgatattcctatttttctggccgcgctgctcagaggcctgtatacccaggccctccattttggcgtggattatggaaaggcggaagagcaggtgtttttgctggagcttctggccctgtctctctataacggagacgattttatggagcgggacgccgaaatgaaccgaaaaatttaccgcatggcctgtgaagatgacagtcagacaaagcgtgaaacgaatctcaaacaggctgcgctcaaagcatccggcgccctgtccggggaattgctgtacatgaagtttttgcaggggatcccggttgccgggttaatcggcggcctgtatgacggcatttatatgaaaaaggtaacggattatgcggcggtcaaattagaaagaaggtatctattgacaaaatcagaggcagatcacagatagaaacagttactattcacggcccatattccgcgaggtgttttcgtgcgtattttgcacggaaatcccgagttttacggcgcgaaacggcgttttttgccgtttctgtgcatcgcggggcgtgttactgttcgcggagctgcgccttttcagtagggccgtgaatagtaactagaaacagcccgaaacggaagaaaaccccgataatcgttgttttttaacggaagattggctataatggtgcatgaatacaaaaacggagaagaaagccggaggaaacaaatgatttttgatacacatgcccactatgacgatgaggcatttgacgaagacagagaagcattgcttgagggcctcacagagcatgggatcgaggccgtagtaaatataggaaacgatatgctcagcacagagcatacactggagcttaccaagcgttatccgcaggtgtacggcgctgccggggtgcatcccagcagcagtgcggagcttgacgaggagaaattcagccttctgcggacagcggccatggatccccagattgtggcggtgggtgagaccggtcttgactattactgggacgagccggaccgcgggatacagaagtactggtttggccgccagctggagcttgccagagaggtgagaaggccagttgtcatccacagcagggatgcagccaaagatacatttgatattatgaaggaacaccgcgcggaagagattggaggggttatccactgtttctcttatggcagggatatggccagagaattcctgaatctgggattctacctcggaatcggcggggtccttacgtttggcaatgcaaaaaagctgaaagaggtggtggaatacgctccgcttgaccgtctggtcctggagaccgattgcccctatctggcgcctgttcccaacaggggaaagaggaattcgtcttataatcttccttacgtagcggatgcgatggcggaaattaagggcctcagccgggaggagattatcagagcgacgaacaggaatgccaagcagctctatcgtctggctccgggaaaagcagaaaggaactgatatgcgcatagatttgggaaatccaaagaacacgatagagataatacagaagtacaatttcgctttccagaaaaagttcggacagaactttctcatcgatacacacgttctttccaaaataatcacggctgccggggtcacgaaggacgacatggtgcttgagatagggccggggataggaacgatgacacagtatctggcagagaatgcgggcagagtggtggctgttgaaatcgacagcaatctgatcccgattctggaagagacgctgaaagactatgataacataaccatcataaacgaagatattctcaagcttgacataaataagctggcgcaggaatataacggaggaaggccgatcaaggtggtggccaatcttccctattatattaccaccccgattattatgggactttttgagagcggggtccccatcgataatattaccgttatggtgcagaaggaagtggccgaccggatgcaggtgggaccgggaacaaaggactacggtgctctctctctggcagtccagtactacgccgagccgtatatagtggcgaatgtgcccccaactgttttatcccgcgtccgaatgtaggctccgcggttatacgcctgacgcgccacaggacgcctccggtggaggtggacgacagggagctgatgtttaagctgatacgggcatctttcaaccagaggcgcaagacgctgctcaacggtctgaacaactcaccggaaatcaatatttcgaaggagaagatagcggaagcgattgaggcgctgggagtttcggcatccgtccggggagaagccctgacgctcaaacaattcgcagagcttgccaatctgctttctgtcgagaaaacggaaatataaaatggaaccgggatccggagagcgcctttttatcaagagggcggttttcggatcccggcaaaaagaggtccggcaaattaatctggaaataagataaaaaatccttgacaacataaagaaaatcgagtaaaattatttacgttgctggtaacaccagtacggtgagagtcagttgatttctcaggaggcccagatagctcagttggtagagcagaggactgaaaatcctcgtgtcactggttcgattccggttctgggcatttgaaacataatttaacagattacattatgcgggtgtagttcaatggtagaacactagccttccaagctagatacgtgggttcgattcccatcacccgcttttttgttgcttaaaacccggaaaaccaagcgtaaagaggttttccgggtttttgcgtatcttgcgcctaatcggcggtctgattattccatatcgagtggcatactctgataaacttcttgaaatgaggggaagaaacgtatctttatgataaacaatataaaaataccgctttaattccatatcagatatcgtacaataccttaaatttttcagcttcacatcattaataaataattttttagccatgattgaatatgctttgctgttgtttacttcaaacttaatcgagtctatattccgatatacttctttcaactggaatttatatcccctggccgctaaggcatgttcgaaatattcccgggtagaattgcctttctcccgcatgattaatggatgttccgacagatcctttagagaaattgaggacctgttgcagaattcactgtgttcattgtaaataaacacaaaatcatcttcagcaattttactgcatactaaatactcgtgatcaaaaatttcttctgtcagtacgaaatcgatttctccgttcaacagtttattcttaagaatataattatcgtctacaatcatctttgtttttacatcgggacaatgataatgataatcagaccagatctcattcaggatgctggaaatggtgataagagtggtgccgatacggatcactttgccaagtgaatttttaatggcttcttccatttccgtatacaggcctatgatttttttactgtaatcgatgaatatttttccctgttccgtaatgacgagttttttggacaggcgttcaaaaagctttacattataagctttttcaatatccagtatcgtttggctgacagtggactgcgaaatgtacagagttctgcttgcggcgctcatattgttgtattttgcaacctctagcaatattgtcatctctctgattgtcatttaagcctcccaactatcgattttgcctatgatgttatcatattttactgttttaccgaaaatatgtcaagtgttataatcgaaaatataaaacggccggattatagatattaataaaaataaagcattctggtgatatgtcaagaactttttgaagaagattttgatatgtttttcagaaaaaagggtaactttaacagaccttcggtatattttacgtataaccgaatgtcagttcgactcaatattatattcggtgtccagcttttcgccggtgtacagttggtttttgaccagcaatccaaaaacgagtcgtactaatttacgagatgtaagcgcgagtgctcttttgtgctgatgtttggttacctcagcatattttctggcatagaaatcagcatattcagggatgtgcttcctgacgctgtttgccgcttcgccaagatagcagcgaagatagggatttccggctttcgacattttgttgtcctcagaagtgaaatctccggaatcacccttaggccagtaaaggccggcatatttggcaagggcatcggatgaatggaacacggttatatcgcctatttctgatagaattccggatgcccatatcggacctattccaggtatggattgaaggatgagcagggcgttagggttcattccgttgatgcatttctcaatcgcctgctcgatcagcttgatttctttctgataggcgtggatgcagttaaacgagcttgccagtgatatgctcagtggttcatacatgcacttgtctaaccggtaggaatccctggctgccttgcgcaggagttccgaagtttttgataggtcagagatgcggttcctgctcttccccgcaaggaaggtaagcagatcctcttccggcatatcgataatctcctgcggagacaaaaattccgtcaggacagctgaggacgtggcaccatagagactgccaaaaggcttgtcatcaccttcaaggagctgaagttcactgaacttcagataaagattcgaaaccatataagtcttctccctggtgatgcactcagaaaggtgcatacggtgccttgtaaggcgtttcagggatatgaactgcccgccgcgccatggctccagttttttcgtgcggcctaccctgccgaagtccgcgatgagatatgcatccgtgggatcggtcttttccattccgatataggattttcggtaattcgaagcggcctttgggtttacacagaatacgtaaggcctgtagggcatgagaacctcgctggccgacaggaagtttgaaatatgcacgctgtatacagaagtagattccagcacgataagaaccgtatccaggtttttatgcttctgcatgcattcggcaatcatatttacaagctgatcggcgcctggctggttattgccaaacgacgatgagatgtatttgttttcctcaaagtccatggcatagacggcattggtctttgagcttacatcaatacctacaaacaaggtggacatatagttgagctttaacatgatatcacctccattccgatggggatttgtgaagcctgaagcaaaaggtttatcctgtgccgcatacggtgaccgaaccctcgcgcaatgagcatgcacccagtcagccttttttgctggggctaacggctggggatgaaaattctgtgtcagcggaatgtgccgtatgtgccaggctgaatgctttcaaagcagtctcggacgaagccggctgaaaggaggagaagcagtgccttcggacatcagactctacctgatatcataccacaggatctacctatattgaaatgtaactatcaactgtatagatgggaatcgggatgaggggagtacctcttagatatccttaccatttatacccaaaaaagaataagtctgtaagcggtttttcttgcttacaaacttattatacgaggaggaagagtatgcaaaatgcgcttacaatatctgggaataatttgacattggatgatatttaccaggtaagccataagcacaggcctgttgaaatcgaagagaaatcaatggaactgctggttaacaccaggaaactggtctttgaactgtccgacaggggagtgccgatctatggctgtaatcgtggagtcggctggaataaggacaaaaatgtaaccagtgaaatgattatccggtttaacagtaatatgatgcattcccacgccgtgggagtgggaccttatgctccgcaggaggatgtgagggcagccatgctgattcgcctgaatactgttttattggggtgtacgggtctgagcccggagattgccgtgcttttaaaggagatgctgaaccgtgaaatccatccgttgattccggagcgcggttcggtgggagaagcagatatcgtaaatctttcattcctgggtctggccctgatgggagaaggtcttgtgaattacaggggaaaggagataaaagcaaaggatgcttttaaagcggagggaattgaacctgtaacattaagggagaaggatggtcttgcagtcatcagctccaacgcattttcagccggacaggcagccagcgtactagttgaaaccgaactgctgcttaagacggcagacattattgcctgcatgtcgctggagggattgagcgggaatgtttcatccctgcgggagggggtacataataaacgccggtataaccgtcagacggaaactgctgcagacatgaggaagtatctaaaaggcagttatttgtatgaaccgtgttccggccgtccgctccaggatccgctgtcctacagatgcgttccgcaggttcacggagctgtcagaacggctatggattacgccgcctccaatttgaccatccagtgtaactcttcggatgacaacccatgcctgctttatgaagaaggcgatattgcctccaatggaaactttgatcctctctgctgggttttgggcatgcagaatctgggaatcgcgctttgccacatatccaggctgtcctgccttagaacaattaagctggcaagtcccggttttacgggattatcccggcacctgacaccggatgaaggcacaatcgccttttccactattcaaaaaagttttgccaatctggatgcagagatacgcatgcttgcaaatccagtaacaatgaacacgtattccctctccggtgacatggaggatatcagtaccaatgcgcctcttgtcatgcagaaagataaaaaaattatagataatttgttttacattctggcaatagaacttttgcatgcaggacaggctatgagcctgagaaatgcagggaactgcggaaaaggaaccggggccggatataaggcactcaggcgtgtggttgatttttacgattcggataacagaattctttcaattgatatcgataaggcgtatacgcttttaaaatcgggtgactttttaaaatcggtgttaaatggtttggaagactaaaacagtaaggggaaaggggaatgaaacaatgacagatggaaaagtcaaaacgggagccaaacacattttgctgagaaaaggggttttttatccgactttcatatttatgctctgcgctgtaattaccggtatttttaaaaatgaatggcttcaggcggcatgtaagagtgtcttccggttttctctgctaaagtttggctggctctatcagattgtcgcaatggtttgtctgatttcagttgcggcagtcactttttcaaaaataggcagccgcagaatcgggggcaaggatgcgcggccggagcattcttttaaatcatggtttgcaatgtcactgaccggaggcatatcagtgggtatcgttaactggggaatcaatgaacccatggtttattttggaaatgtttacggcgaattggatgcgctcggaatacagcccggaacattggaggcggcaagatttgctattgggagatgcttttataactggacattcgtaccttattcattttatggaataacgggcctgctgatcgcctggttgttttttaataagaaagaaaaattttcggttgtagcaaccctgaaacctctttttggagacaaggtctacaataatacaatagccagtattattgattctctctgcaccataggtatagtcctcggcatggcaaccggactggggaccggactttcctttgtcctctcaggatttaaggttgtatatggaattgatacgagcattatcgtatggattatcctgggtacggcagtcaccgccctgtttaccggcgcggcctggctgggaattgacaagggaataaagaagctggctacatttaacagtaaaatattctatttcctgctcatcatactgtttgcgacaggacctgttgttgatatctgcaaagccctgccgatcggcctcggcgaatggctgacaaatttctgggtctggggccttgatccggttgatatcggaggggaagctctcacggtctggtggacattgtttgactggacggtctggattgcctatgcgcctgtaatgggattatttctggctaagatatcttatggaaggacaatccgcgagtttatgattatcaactggatattaccttctgttttcggccttgtctggttttccgtatggggtggaacggccctgaactggcagatgaacggtgttgtggatttggtcacaattctgaaggaaaataacgctaccgccgccgtatggggatttttgcagcatcttccattccgtatgggaatcgtcctgataccggtagtaatggtcactttgattctttcgttctgtaccgcggcagattcgattacacatacgctggcatccctctgtgtttcacaggaaagaaacaacgatgaggctcctgcttctctgaaactggtatggggagtgatcataggttccgtttcagttattatgggagcgcttgccggaggtgtgagggcgttgacggcctgaggcagctttcatcggtggggcgtttatcgtactgggggttttcatactacagcttatatcatttattaaaacattttttatgagcggtgaattaaaggagtaaaggattttagagaacaatcaggaagaaagaggagcatatggaaattttatatttgaattctaaggatattgaagaaattaatcttaccaacgatgaaattataaatgcggtggaagacagcttaaaagcacaggggaaggaaaaacctccattgagccgcgggttcatatccatccgaatccggaataccacggacattttaatgtgctgcgaggctatattgagcctaagcatgcggtgggagtcaagattgtgggtgactatgtctttaactatgaaaaaaatcttccttctgaaatgtcactgctgaacttgtttgacccggaaacgggagcgccttatgccgtaatcgacgcaactgcgattaccaccatgaggacaggggcaataaccgcggttggggctaaaaaccttgccaaaaagaagaataagatcctgggccatttaggctgccgcggaacggcgttctggaatgttgtcctgcttgaccatctctatgattttgaagagataagaataaacagcagaagacgtgaatcaatggaatctttcgcaaagagcctggaggcacggttacacaaaaagataacgattacggaaaacagccgggaatgcctggagggcgctgatattatggtggaggccacccgcctgatggaacctatgcctttgctgaagacggaatggatccggccgggaaattttgtagttccttacggaactatttgcgccaatgagataaccctgacggatgtcatggataaaattgttgttgatgactgggggcagtgcagggaaggcggcaggctgggaagcctcagtccgcatgtgagagctggcaagctgaccggtgaaacgctgtacgcggagctgggagatattgtggcgggaagaaaagcaggaagggaaagtgatgaagaaaaaatcctgttttggcacagaggtctttccatcaacgatatcgcgctgggacagctgtactatgagaaagcgctcgcttcgaatatcggaacaaagctgttttacagataaaaactaaaagacccgtccggaacgtaacagtaccggacgggtttttagtaatggcggcggcctgtgcgcagagcgtgcaggttaacgttgcctgagaaatcctattttgcaaaatcttccttcctgaacagggagcggagcaaaactatccagccccaggagagggaaaaggacggcatgcaggccagcaggactgcctttacaggaggaatggccgaaaagcagatgggaccgaaaaaaataacgaaagtggctaccagcatgaccagcagcgtgattttttcttttctggtatttgggggagtaagaaaaatttttgttaaatccatttccacctgtcttttttccatgcttttcatctgcacatttctcctttttaattgatagatagttatatataacgatttgatagtatgaatcagtttaacgtacccgttatggattcgacaatccggatcaggtgtccggaatgaatcagttccctgaggtattcgatgtaaggatggaggaacatatcctgttccatgatggggacatgtctgccgatttccttcataacagcttcagtggctgcactccttttaacgtcggtatccaggaactgctgcgtctcataggcggaaagcagctcgatggccaggatatactccagcttttcggctgcagagcccgcttttttgcaggcgttgtatcccatagccacatagtcctcctggtttccgcaggtaggcgtgttgtcgatggttgcgggggtagccagaatccgcatctcattcagcaggccggcctgcgtatactgagggatcatcaggcccgaattaaggcccggcgtctttatgcagaaccacggatttccggacaggctttcgtcaatcagacggttatttctgcgctccgacatcttggcaagggcagcggcggcaatgcaggcgctgtccatttcgattcccacataggaggagtccgcattgcaggctgagatgacatcctcattgccctgtccgggccagatgattggattgtcacagcaggaattcatctcaatctcaatgacttcctttgcatccttcagtgtttttttagaagcgccgtgaagctgcggaatgcagcgcagggacagggcgtcctgtacgcggctgcctttatatttttcgataataccggagccgtttaaaatcgttctcacattttctgctgttttagcctgttcactgtgggggcggacagacataacacgttcgtcgaaggcgttcatcacgcctttgcatgcctccagtgtggcggagccgatgatgtcggctgctttggctgcgtttagcaggtcgtaaatcgccagggcagccatagcggtgggggaggtggttcccgatacaagggcaagcccctccttggaacttagctctaacggtctcattcccgctctcttaagcgcttcgccgccctccagcagttcaccttcataccaggcattacccctgccaagcagcacaagggccatatgggcttccggcgccagatatccgacgcttccgtctcccggtgtccagggggtgatgcctttattcaaaaagtctttataatattctaaaatggtcaggcggactccggaataaccctggcccagattttggagcaccataagcatgattcccctgacccgctcaatagacaacggttccccgacggatacggagtgtgagaggatgatgttctcctggagtttggccgtttcatctttaccgattgctttggtgcagagagcgccgaaaccggtggtgactccatacatgactttctcttcggaaacccattgttctaccagttcccgggatttttccactcgtctgcaatattcatccgagaattcaacggctgcgccatatctggcaactgcaatgaaatcgtccagtgtgataggagcgcctaacacgatattttttatattgttggctgtatttatactattttccatattgatttgattttaccttcatagagagttactctgtctgcgtgttactctgcccggatattacttcaggcttccccggttttggcagttccggcctgaatgtttttatccgtatattcggcgcattcttcaatgtcctttttcgtctgcgggtcaaagaagaacactttgatggaagcgattacctggaggataaagatagccagtacgacgaaaccgccgcaggccgccaggtatttaactccgtccacaccctgggaaccgccgccgaatgcaaccatgatgcaggcgatgagtccgatggagacaccccagactactttctgccagagagccggctcttcatcgtggcgggcgccttccgtacagagggccgcaatcgtggttgacatggtatcggccgttgttgagaacgccgctatcaaggtgatgatgataacaggaatcaggattgctcccaacggtacatgctttaagaactcccagatgccggatacggctccgccttcattgatggcagcgatgatatcggctttgccgctgatctgccagtcaagagctgtgctgccccatacggagaaccatacgaaaccgaaagatgccggaagaatccagttgataatcaggaactgccggattgttctgccataggcaatgattgcaaagaagatacccattaaaggagcataagcgatccagattgcccagtcatacatcgtccaccaggtaacaagcgcttctccgcctactgtgtaagggtcgaatccccacatccagaagcggtcgagccagtagccgagtcctacatttgccatgttgaggatgtaaacggtcggcccgatgatgaagagaaggattaaaagcacatagaaaatttttgatgtcatgcctgccagccacttgatgcctttatcaataccggctacggatgctgccgtgaaagttactgtgatgattgccgtaaggatgaaccatacgacaggaccctgcgcgatgccgtaggctgcggaaagtcccgtaccaatcagtgcaagtcctgcgccgagggaggctgccagaccgagtgcaattgccagtacggataatacgtcaaccagcgctttccagaagcccttcgtcaccttctcgccaaacagcggtgtcagtgaagcggaaacggataattcctgtttgcggttgaaatacatgtaggcgatgataacgccggaaagtgcatacatggcataaggaataacggtccagttatagaagctgcggcccattgcgaaataggctgcctcattggaataggcctgaactccgtagccgtccagttccccgtatacattgccgaaataaatcagaacctcattaacgccgtacgtaatcagtccggttgcaatacctcccgtcagggtcatggcaaaccaggaaccgaatgaatactttgcttttgcctcaggtccgcccagcttaatcgtaccgatttttgaaaagcacagaagacttaccagaatcagagttacaactgcaattacctgatagagccagccgaagttacccagagaccatgtgaaaattgccttggtgacttcagtgagccatgcattgttcacgataccgagaatggcggccccgcctacgattaaaaagcagggaataaatacgctccaccggatcggcttagaatttgaatttttttcactcatgttttttgttgtatagagtttcccccatggaactccatactctcctttccgtttttctgatattatataaagcaaaaaccgtgccaactttttttgtttttgccggagtggtaaaaaatatattatagtaatacacaattttcgttgtatttaacagtattttgaaagaaattaaaaaataaacaaatttgcggctgtctgctttggaaaaaaaacagagtgacatatggaagcgttttctgtaaagaatgagtcgatttgcgccaaattattttgcttaatgccaaatgatttggcatctaaacttgacggaagaatcttttttatggtactatgtttcgtaaaagatacgtgctgagatgagggaacgggatgaaaatttatgatttttactttgtactggacaaaaatcaggtgatgctgagaacggaatgggggaatccccggtcggaggatatgtaccggctgctgttttcaaactggatactgaggggtgaaaaaccttcgggtgtatttccgatggcggacgaggaccaggatggggagctgttctgggatgaagatcattttacttttgaaaagataaaggtgtcaaaggagagatattacctctttttcaaaaaaaggaatgatcaggagaatctgtttgccaagacgctggatcatatttcagacgggatccagatttatgataagaacgcctgtgccgtattctttaataaagccagccgggaaattgcccatataccttcggatgtctccattgagggaagatatctgctggacatgtataatctggatgaaaatataagcacgattatgacatgcctccggacccagtctccggtaatcaacagggtggatcattataagtccagtgacgggatatcgattgccacggcgaacacggcctatccgatccggaaaggaaaggagattttaggctccgttgtatttgagcagaccagcgatatcgtgaagagatataataaaaagatgcaggagattgaacaggcgctgaagctctatgaggagcattcccattatacacggtttacaggatacacctttgaacatataatcggccacggagtaaaattaaaagaggcggtcggcatagccagaaaggtggcgtcccagaacagctcgattcttctggtgggggagaccggaacaggcaaggaaattttcgcgcagagtattcaccgggccagcggccgtaaggataaaaggttcgtcgccctcaattgtgcagccattcccgattccctgattgagagccttctcttcggcacgcaaaagggaagtttcactggcagcgagaataagccgggttactttgaggaggccgaaggcggaacgctctttctggatgagctgaattccatgagcctgagtatgcagtccaagatactcagagcgatccaggaaaatacattccgcagagtgggaggacagaaggacatcagaatggatgtacgtattatttcctcctgcaatgaagatcccttccgtgcaattgctgataatcagttccgcaaggatctgttttaccggttatcgacggtgatgatagaactgccgcctctcagggagcataaggaggacttggaggagctgatccgttacaggctggacgccacggcctttcaatacgttcactcgttttctggaatttctcccgaggttatggaaatcttccggtcctattcatggccgggcaatgtcagggaactgttccatgtgctggattacgcccagaatgtggcggacggagagacgctccggcgggagcaccttccaggctatctgagaaaattcggtgaggagagccggggtgtgcagactttccagccggcaggggaagacaaagcttcggggtttatgccgggagtggagcttcagagtatcatggatgcttatgaacacaaagttctgcagaaggcactggagcattatggatataatatcacgaagacggcggacgcgctggggttgaggcggcagagcctgcagtaccggattaagaagtatggaattataatataaggggcgccggaccggaataaaaaataaaaaaattgcaaaaaagtgcttgccattgagcgtgaattatgatagaatacttctcgttgacaggtttgttaattgaacctgagagacatataatattatgcgcgagtggctcagtggtggagtatcgccttgccaaggcgagggtcgcgggttcgaatcccgtctcgcgctcttataaaagaaagtatcatgcggtttcctttcggaagccgtatttttttgtgcagaaagtctacccatacgtcctgattaatcccaaatagcatatatctgaaacaacagatgaaaattttgtaaaaatttgcgcttttctgaatttttgaaataaataaatatttttgtatatacatccaattatttcctatataccctcttgatttatgttgatacaatatgaatgtcgtaataatatcggtataattcaccgtcattatgactgaagcggcgagcgtttttttacatatggccgcaggtgtaagacggagtggattattaaccgaagaaatgtggaggggatttatatgaagaaacggaaagcgacgctttgtcttgctctggccgctgtgtttggcatttcatcagtggcggggtgttcaaagactccgaataacagtgggcaggatgaaaaggctgccgaaagccaggcaggcagcactgtaggaggagcagacggctccggagacggttcgggaagctccggcgaatcaaccgccatcaaagaagcggggccagatcctaatgcgtccgtatttgcaggagaggaatggtttgatcagaggggaacgtttgaggtgaaccgggaaaaggctcataccagctttatttcctttgcatctgaggaagatgccagggtaagggagaaggagaagtcacctttttaccagtctttaaacggaatttggaagttccaactggttgacagccctcatcagaggaacacagaattttacaggacggactacgatgtcagcggatgggataatatcgatgtaccttccaactggcagacggaaggttttgattatccgaaatacacagataccaggctgccttgggaaggagtggaaattccggaactgggcgtgtccccgactttgtataacccggtaggctcctaccgcagggactttaaaacgcctgagaactgggacggcaaggaggtttttgtctccttccagggagtggaatccgctttttatgtatgggtgaatggtgaatatgcaggctacagtgaggacagctacacagccgcagaatttaacatcagcccgtatttaaatgcagccggtgaaaataacacgattgcggtgcaggtataccgctggtctgacggaagttatctggaggatcaggattttattcgcttaagcggtattttcagagatgtatttttatacagcaaagaccgcggcgcttccatttttgactttaattacaccacggatctggatgacagctacgtggatgcagtgatgaatattgaggcggtgctgcgccgtttcgacgagtctgccgggggcggacatactttggaaactgcgctgcttgataaggacggtaaagaggtgttcaggaaaacgcttcctgtcacatttgatggagaggaggcagtgatctctgaacaggtttccgtaagcaatcctgcaaaatggtcggcggaggaaccaaatctttatcagatggtgctgactttaaaggacagcggcggctcaattctggaaagcgccggctgcaacgtgggattccgggaggtttccattatcaataacgggactaaccaggctcaggtcgtgattaacggtcagccaatcatgttcaagggagttaaccgccatgagacggaaccgcaggggggaaggcatatcacggaggaaagcatgattcaggatattcttctgatgaaacagcacaatattaattccgtgagaaattcccattaccccaacgagccaaggtggtatgagctgtgcgacgaatatggcctttatatgattgacgaggctaatattgagtcccacgggctgaatgattatataccccagagcgatccggagtggatgaaagcatgccgggacaggatgaccagcaccattgagcgcagtaagactcacccaagcattcttttgtggtccctgggaaatgaatcctataacggtgatacctgggctgatttgggacgtctctgcaaggaactggatccgtcacgtctggtacattacgagggggaccgggatataccggaggttgacgtctggtcccgtatgtaccgccgcgttaacaagccggatgtgatggacaagactgccaaccccctggtctggtggggcaattacggtaccaagccggctctccagtgcgaatatgcccacgcaatgggcaacggcattggaaacttgaaagaatactgggatatttatgagaaatatccgattttacagggcggttttatctgggactgggtggatcagaccgtggagatgccggttccggcggaaaaacgccttaagaatgacgcgggagatctggcaattactttaaaaggcagcctggaggatggcggaaatgaaggaaaggcaatgaagggctatgctgtctgctacaatgacaaagcgctggccttttccggaaagatgccgtttaccctggaggcatatgtatatcctgaggatacggtggcttcaacaccaattatcaccaaaggaaatgatgagtggaagtgtaccgaatcctacggcttacagagaaaagtattctttaatcaggagacaggagatccggtggaggattatcttgaattttatatctacaacacagagtggaacgaagacgacggtgtttataccaaggtatcggcctccattcccacacctgataactgggccggacagtggcaccggattgcgggaacatttgacggagagaacctgaagctgtacctggacggaaaagaggttgccgcggcgaaggattcccacggaatcgccaggggaggcaatgcggtcggcatcggcgcggatgtaacctatgacgcacagaatccaaacgttccgccggtctttaaaggattgattgacaatgtacgtatctacaataaggcgctgacgccggatgagattaaaaaaacctcccgcaaaccggatgagaacgcacttgtatggctggattttgaaggggcggaggatgtgacatatccgcagccgacttattacagcttcggcggtgactggcaggatatacccgcagggaaccctaataataagaacttctgtgctaacgggcttgtatcagctgaccgtacagtacagcctgagttagtggaagtaaaaaaactgtatcagaatatcggtctggaaaacggcgatgtgatgaacggtaaaatactcacaaagaataaatacttatttacaaaccttaaccggtttaatgggtcctgggagctgatggaggacggaaaagtaatacaatccggtatatttgcgcctgaggaactgaatatcgctcctttggaggaagggattcttaccgcagcctttacaacgcctgagttcaaaccggggctgaatatttcctcaatgtaagctttaccctgaaggaagacacctcttgggcaaaggcaggacatgaggttgcaaaggaacaattttatctgccatttaacgtaccgaaggctgatgcgtcggaagcggaaatggatccgctgactgtggaagaggcagatgctgcggtcaatgtggaaggaaaagactttgacctggtatttaacaagaaaacgggcaccatagattccttccggtttaacggaattgatttgataaagaacggccctgttcccaacttctggcgcgcgcctacggacagtgacctgggcttttattctcagttggagatggccgactggcgctatgcaggtgaagacaggacagtgacggacgtgacagtgaaaaaagaaacggatcgtgtgacatttacagtgagcgcagagcttcctacacgcaccacctccggatacaatcaggtatatacggtatacggaacaggcgatgtggaaattaccagcacattaaagccaggaagcgcggacctgccaatgatacctgaaataggaaacatgctgacgattccgaaagatttttccaatattacctggtacggacgaggaccggaagaaaattatattgatcgtcagaccggttacggagttggagtctaccgtaagaatgtagacgaatttttcattgattatattaagccgcaggaaacagggaaccgcacagatgtcagatgggtgagcctgaccaatgatcagggcgccgggcttctggtgaaggcggcaaaaccaatagaatttaatactcttacctatacgccggaacagcttaccaatgcccttcattcctatatgctgccggaaggccaggatattacactgcgcatcaacatgcgtcagatggggctgggaggcgacaactcctggggagcaaagccgctgactaaatatctgaatccctcggatcagaattatcagtacacatatacgttaaagcctgttaagacggacaatgcggatgaactcatgaatgattaccgcacaccgattaagtagaagcgacaggcggtatctgcacccggggcgtgtacgctgctgcgtaaatttcagccggaaattttgtgatattactgaagttgtaataaaatagtcgtaaaatattaattaaaaggtaaatatagtcaattgtctgacagatgaaaaaatgctatactgttgctatgcttattcggtaaaagaagggctgtacggcaatagccgtttaaaagtgaggaaaaaggagaaaaacaatgaaaaagatgatcaagacagcagcagtcatcatgtcaaccattatggtattttccatgacagcatgcgcaaagaaagcagatccgaaagaggtatttgacgcagcagttaagaaaaactcggagctgacatccttggatatggatacgacaatgaaaatgaccatgacccagggcgaggagaccatggacatcacggttgatatgaacatgaagatgagcaacatgaatgaggactccatgcagtaccttgccgacacaaaaacttccctgatgggccagagcatggatgccaggattttctataaagacggatattattacatggacggaatgggccagaagattaaatatccgatggatttgaccgaattgatggaatctgttaaacagagcaccgagagtacaaacctgcagtccgagcagatgaaagagattaccatggcaaaagaggggacagcacaatccttacttttaccgctgacccggaaaaaatgaatgcttatttatcggaagttatgggcagcatgagcggaatgggcacaatggacggtatggagatgaccttcaaagaggccagcggaacctatactgtaaacaaagacggattctacacagacatgacaatgaagatgagtgtggatatggcaatggaaggcgagtctatttccatggtcctggatttaaccggtaaagtgaataacccgggacaggatgtgacggtagagcttcccgacacagaaggatataccgaagtggagatgccggcagcccagtaactggctgaaacggctgaagcagtccagacaatgtaataaatcccgtacggccttttattcaggctgtacgggattttttgccccggttaatcgttaataccggccctgtatgcggaaagttcctcctgataggcagccgtcttatggtaaccgtaacgttatgattttagcatgcaggctgataatcggcaaccagttttcccggtgagatgtatacaaaaaacaaagtacttaaaaaagaacttgtgttatggcggaaggtgagtgtaagattgggatggaacatatttacaaatttttaacatttattattttattacttttaaggggagttttattagtatgaaagaactgaaaccacaattgtttctatccatgaaggagtattccggaaaacagctggcgggggatttgacagcgggtgttatcgttgccatcattgcccttccgctgtcgattgctctggcgctggcctccggtgtgacaccggaacaggggctctatacggctattatcgccggtttcattatttcctttttcggcggcagcaaagtacagatcgcaggcccgacagccgcatttgcctcaatcgtggcgggtattgtggcccggaacggaatggacgggctgattattgctaccgtactggccggaattatcctggttgccatgggacttctgcatcttggaagcatgattaagtttattccttttacaattaccaccggctttacggccgggattgccgtgactatcgtgattgggcagattaaagattttatggggctggcctttgaaaaggcgcctgtggaaacgatggagaaactggagcaggtaattgcctgtttcgggacgctgaacgtccaggcgctggcagtggggctgatatcgctcgcgattcttatcatatggcccagattctttaagaagataccgccgtccctgattgccgttcttgtgtcggccgtgctggtaaaggcggcagggctgaatgtcaatacgataggggatttatatacgatttcttcctccctcccggcttttcacctgccggaggtatcctatgaactggtaaaaaccgttttgccggatgcatttaccatcgcaattctggcggcgattgaatcattactctcctgcgtggtagccgacggtatgatcggcagcaggcataattccaatatggagctggttgcgcaggggctgggcaatgtgggttctgcgctgtttggcggtattccggcgacaggggcaattgccagaaccgcggccaatatcaggaatggaggaacctcccctgtagccggaatggtccatgccgtcgtccttcttctgacgctgctgcttttgatgccttatgcggccttgattccaatgccggccattgcggcaatcctgttcatggtggcttataacatgagcggatggcgcacgttcgcagagattatgaagacatcaccgaaaagtgatgtgaccgtactggtactgaccttttcgttaaccgttatctttgatctggttgtggctatcgcagtggggctgattctggcttccctgctcttcctgagccggatggctgatgtggcggatgtgcaggaatgggattatctggacgattatgaagagggcaaggacaacaggaacctgaagccggttcccagccatacaacggtatttgaaattaccggaccaatgtttttcgctgccgccgacaagattctggaagtgccttttcatgaagaaaagaaggtgatgatcctgagaatgagaagtgttccggctatggatatcactgcgctgaacagcctgagaaaactaaacagtgtctgcagggagaagggaatccggctgatgctttcacatgtcaatgaacaaccgatgagggttatgaggaaggccggcttctgtcatgaggcaggggaagaaaatttctttggctgtattgacgaagcgctggcagaagcggaaaagacggccgtataagggtacggccgataaatgaatacatgataacacggcagaaagccaaagtcagcagcatgagtgatgactttggcttttttggcgtctctgtaaaactattccaattgtactttttttaacgggacagataagcataatattgatgacgaataagggtaaaacctttaattatcaaggcctgacagagacagccggagctgattcggttatctgagggataaagaaacggatataagaatgaaatattgtcagaaatctaacaaaatactgtgcatttgctaagaatacagggcgtgatggagggtgttttcatcctgataagattataataaaaagttttcaaatatcttgacaaggattttacaaaatgataatatttttctaaagagaataacatatcttgtaatgttatataatgagctggcgcggtgaaacagccattttttatgcatctacatattatataatgatacataataacatgctaaatattatacgcattaagcgcatatgcaaacagggctgctgaatctggcggaagaaacagagagtaaagagaagagagtgtgagcggatgggagaagttttactgaaagtagagaatcttaagatggtattccagaataagaagtcctcatttgctgcggtggagggactcagtttcactgttgaacagggaaaaaccctcggaatcgtaggcgagagcgggagcggaaagacgatggcgtctctctccgtactgcggctgcttccgaatcagggaagggtggcggaaggtgagattacgtttaagggaaaaaatcttctgaagctgagtgaaaaggagatgcaggaattaagaggcaacgaaatgtcgatgattttccaggatcccgtcatgtccctggatcagatttatacggtcggggatcagattattgaggcgattctgactcatgagaaaatgccgaaggccgatgccaaaaagagggcgttatccctgcttggcgatgtgggaattccccatccggaacgcgtgtaccgctcctatccctttgagctgtcgggcggtatgtgccagagggtcatgatagccattgcgctgagctgcaatccgaagctgctgtttgcggacgagcccacgacggccctggatgtgacggtgcaggcccagattatggagctgctcaagaagattcagaaagaatataatatggggattgtcctgattacgcatgatttgggagttgtggcggatgtggctgacgatatcgtggttatgtatgcgggaaaatcgatggagattgcaccaaaggatacgatttttaattcaccgtgccatccttatacccacgggctgatccgatccatcccacagctcgatacaaaggcggaacggctctacagcattcagggaacggttcccgacatcaggaattttcctccgggctgccgtttctgtacgcggtgtccctttgttcttcccgtatgcaaagagaaggagccgccgtttgtaaagctaaatgagaaacatttcgtcagatgccacagggcggaggaaattgcgaagggaggcctgattgatgagtgaagtaattctgaaagtggatcatcttaaaaagtacttccctgtcaaggcaaagatgttttccggtagcaaaggtacggtccatgcggtggatgacgtaagctttgagataagaaaaggtgagacattcggcctggtaggggaatccggctgcggcaaaagcaccctgtccaggacaattttaaacctggtgcctgccgatgggggaaccataatattcaatggagaagatatcacgaacctgaagggaaagaaaatggaaaaaatccgccgtaagatgaggatgattttccagaagccgtatggctctctgaacccgagggaaaaggtgaaggagataatcggggcgcctcttaaaatccatcatacggtgccggaaagcgggctggaggatgaggtactcaggctgatggatatggtaggcttgaaccgggagtggctaaaccgctacccccacgagttttcgggaggccagaggcagagaatcggaattgccagggcgctggcaggaaacccggagttaataatctgcgatgagccggtgtcggctctggatgtatcaatccagtcacaggttctcaaccttctgaaggatcttcagaaagattttgaactgacgtatctgtttatttcacataatttatccgttgtgaaattcatggcggacagaatagcggtaatgtatctcggtgtgatcgtggagctggccgacagcggggaaatctatgaaaatgcgtcccatccttatacaaaagcgcttctgtctgcgattccggaagcaaagacgacgcagaagaaagaacggattatattaaacggcgatataccaagtccggtaaaccctccggccggctgccggttctgcacacggtgtccttttgcacaggatcgctgccggacggagaggccggagcttgcggaaataaggccgggtcattttgccgcctgcttcctggccgggaaagggggcagctgatatggtgaaatttatagcaaaaagacttgcaatctcagtggtattactcttcattgtgacaactttggtattcgcatttgtacatatgatgcccggcgatccggtccttacgatgctgggcgtcgacagcaaccctgacccggtcacggtggaaaagatccgcacggagctgggactggatcagccgattctggtacagtatggcaattatctgaaaggaattgtaaagctggatctggggaaatcctattccgagaagattccggtggtacaggcgattgcatcacgtttcccgaggacgctggagctggccttcgtgtccctggtgcttgcctgtctggcggggattcccctggggattatcgctgcggttagaagagggaaactttccgatttgatgctgacaacagtggcatcggtgggaacctcggtgccggtttatgttctggggtatctgctcgtggtggtttttgcgctcaatatattcaatcttcccattgcaaagctgccggccagcgggttcaccgcattttccaaggatccggccatgcatatacagaagattattcttcctgccgtcacactggcccttggtgtggcagcatccatcatgcggacgacgcgctcctcaatgctggacgcgatggcggcggaatccatccggccgctgcgtgcaaaagggctgtcgggcggcaaagtcatcagaaagcatgtaatccgcaatgcgatgattcccgttatcacgattatcggcctgcagcttggaaacctgattggaggaaccgtactctgcgagacggtatttaactggccgggagttgcctcccttctcgtaaaggccatcaatcaccgtgactatccgctgatacagggatgtgtgctgctgatctcggtcgtttacatttttaccaacatgatggtcgacataatatatggaattctggacccaagagtgagataggagggataaaatgttaaagaaatgtttcagcaataagaagtttgttgttggctttatcatactggtccctctgatcattgttatgatatttggcaatttcctggttcccaacgatccgtatgcgcttgatacggtaaatatgctgaaaaattcatcggcaaaatatcctttgggaacggacgagtacgggcgctgtatcctgacccgtctgattctgggaatcaggccgtccatgatggtagccctgggagggacggccatttcatttgcgggaggcactctcctgggggtggcggcaggatatctggagggaaggatcggcgccgtcatcatgcggggcattgatatcatcctctgcttcccgcccatccttctggcgatgattattgcgggactgtggggcgccggtgtaattaacctgatgcttgtaatcgggctcctttacattccccatttttcacgtgtcgcatattcttccacactgcaggtcagaaaaatggaatatgtggagagcgatttatcgatcggcgcggcgccgtcggctattatgtggaaggctattttcccgaacatcatatcggttctgattgttcaggtgagtaccacaatctcaaacgcgattctgctggaatcgggactcagcttcctggggctgggcgttcagccgcccacaccgtcctgggggcagatgattggctcggcaaggggatatctgaatgtcaacgtcatgtatttgttctggccggctgtctgcctgtgcctgacgattctggcggttaacctgatgggggacgcaatcagagatattctggatccaaagcttaacaacagtttttaaaaataaaaggaggaagattcatgaaaaaaagaagtttgaaaaaagttgctctgacactggcggcggcactggcggcatctgctgtactgacggcctgcagctccaagacaggaggcagcgacacgcagcccgcatcagcagaggcagggggtgccacgggaacagagggtacggccggagaagagggcggcagcaaaaaggatacgttaaatgtggggatcagcgccgaaccggccacactggatcctcatctgcaatcgggacaggccacgcgtctgattaagcagcagatttacaggggactgatgacctataccgctgattcaagcattgaaacggacgtggcggattcttacacggtatccgacgacgggctgacctacacctttttattgaaggatgccaccttccacgacggttccccggtaaccgcagaggatgtgaaattttcgattgagcgtgtgatggatgaatcggtagcagccaccttcggaagcgatttccgctctgttgtggatcatgtaaacgcaccggatgaaaaaacggtggaaattgttttaaaacagccgtgtgcgccgttcctggaatacctctgcctgccggaggcggccgtagtgtccaaggctttctgtgaggcgaataataacgatttaagtacggttgccatgggatgcggtccttatagcttcggaggatgggaaaacggactttccatcagcgtcaccaaatatgacggctggtacgggactccggtacagacgcctaatatcgatttctacttctatacggacgagacgaccagggccaatgcgctgcggacgggagaggttgatattattgactacgttccgtcgaaggaggttatcgcatttgagggcgcgggagacgccaacgtagatgtatccgtagctcctttcatgtgccttcagattaactgtaccgagggaagcccgctggcggatccgaaggtaagacaggccatctcctacgcaatcaagagggatgatgtaatcaatgcagcatttatgggacggggagaaccgatttttgggttcccgaccatcgtcggacagaacggatacgacggaaaatatgacaattatttttcctatgaccctgaaaaggcaaaagaacttctggcagaagccggttatcccgacggattctcctgcaagctgctgtcctcctccacttatgccatgcatgagcagacggcggtgtgcgtacagtccagtctcgctgaaatcggaatcaaggtggagcttgagcttccggactgggcgacacgtatcgagcgctccaatgtaggcgactacgatatgatggtttccggcacgacaggaaacatcgtggacatggactgggccaccaattactatgagagcggcgatgtccgcatgaacagctgtccgggctttgcagacgacaaaatcgacgaactgcttcagaagggcagaaccacactggacgaaaaagagagggaagaaatatatgatcagttcagggagagggcgctggagctttcaccgttcgtgttcatcaacttcagggagcaggtatttgcaacggctaagaacgttcacggatttcagaacctggacggcatcctgacctatctttccggccttaccttacaggatacctatgtagaagagtaataaaggttactgttcacaccatgctaaaatacagcttgatgtaaacaataacacgcttcgcgatgcacagaaactgcaaaaaacgcagtttcgcgccgtgtaactcgggattttcgtgcagaaaacgcacgaaaacacctcgcggtatacaaccgtgtgaacagtaactaataaatttcagtgcatgcatgaaaaaggcggaggcggtcatggtaagagtaattggaattggcgataacgtatgcgataaatatgaacatttaaaaaccatgtttcccgggggccaggctctgaatttctcggtgtatgcgaaattgctgggggcagacgcctcctatatgggggtattcggaaccgatgaggtggcggttcatgtaataaagacattggacgagctgggggttgaacacggcagatgcaggcagtatgagggagaaaacggctgcgccagggtgactcttaaggacggggaccggatattcctggggagcaacaaagggggagtttccaaagagcatccctttgaactgacggaggaagacctggcatatatcagcaccttctctctggtccataccagcaacaacagctacatggacagccagctggaaaaaatccatagagccgggattcccatttcctatgatttttccgggcagtggatcgacgacggacgcgtctgccgggttgccccctatgcatcctatgtctttctgtcctgcggctccgtcacagaggaggagggcagggaaatctgtcacagaatgcatgcaagggggtgccggtttattgtcgcgaccagaggaagcaaaggcgctctggtttacgacgggcatgatttttacagccagcctcctcatttggtggaggcaatcgacacactgggagcgggagactcctttgccacggcctttctgctttctttgactcaaagcagaaaggaataccgggaacggatggacagcgacagaaagctgtaccggcagcagctaaaagaagcgatggaaaaaggagcttcttttgcagcggccacgtgtctggtacagggagcatttggacatggcagagctttttaaattaagaacgaactgaaggacaaataaaatgaggtgacaatatgagctatatgattggcgtagacgtaggcggtacgtttacagacttctcaatatttaatacggagacagggaatttaaaacattttaagcacagttccacaccggatgacccctcaagagcgattgtcagcgggattctccacgtgcttacggaagactgcatcaaaccggagcaggtcagctatctggcccatggaacgaccgttgcaacgaatgcgctgatagagaagaagggagcgcgcctgggcctgatcactacaaaagggttccgggatctgatggaaatcggctggcagaaacgcccctccctctacgatttgtcaaaacagaagccggagagcctgataccggacggcatgaagcgcgaggtggaggaacggattctttatgacggcacggttaaaaccgccctgaatgaagacagtgtccgtgaggcagtgcgttacctgaaggaacagggcgcgcagaccatcgccgtatgcacgctgttttcctttatcaatccaaagcatgagatccggatccgtgagattatcaatgaagaatatccggaggcttatgtatccacctcccatgaactggttcccgaattccgcgaatattcgagaatgagtacaaccgtactcaatgcctatcttggaccggtcatggaaaaatacgtacataattttgaaaagtccattctggattccggcattacggcagcgccctacgtcacacagtccaacggctccgtcatatccatcgccgagacaattgactgtccgattaagacagccgtatccggccccagcgcgggcgttatcggcgctgtttatattggaaagcagtgcggcattgacaaggttatcaccttcgatatgggcggcaccagcattgatgtcagcctgattgaaaacgggaaggcgtcgctctccaatgagagactcgtagaaggatatccggccagaatcccgatgattgatatcgtaacggtaggcgcaggcggcggttccattgccaggattgatgcaggaggcgcgctgaaggtaggccccgacagcgcaggcgccacgccgggaccggcctgctacatgaggggcggaaccgaggcctgcgtgaccgatgccaatattgtcctcggcaagctgaaccagacgaaaatactgggcggccggatggacgtggatctcgggctggctgagaaggcgattaaagaaaatatctgtgataaatcctccctggatttaaaacaggccgccgccggaatcatttccgtcgtaaattccaatatgacgagggcaatccgcgtcgtatccgtggagagaggatacgatgcccgtgaatttaccctgatggcgttcggaggcgccggaccgctccacgcgtgtgaggtggccagggatatgggaatcacctccgtgctcctgccgccgtccccgggaacgctctgttccctcggccttctgatggccgatacgaaattcgatatcagccgttccaatgtcatgctggccgaggaggagaacctgccgaaggtgcagaaaatatttgacacgctgactgcggaggggaatgaacttctggataaagagggcgtagctgaaaaagacagaagcttcacttatctgatagagtgccgctatgagaggcagaattatgagatcgggattgaagtgaagggacagttcgggaaagaagtcatggaagaaatgattgaacgattccatcaggaacacaaccgctcctatggttacttcaaccgcagcatgaaactgcagatggtaaactaccgcgtcagcgccatcggcgacatcatcaagccggatttggcggaaatgccggcagatccgaatgcggagcctccaaagcctttcaccacacgcgaagtactgtttgacagggaaaaggactatatcacgacaaacatttataatcggaatgatttcaaaccgggatgcacgattatgggaccagccatcatcgagcagatggattctacttctgttattccgccggactggaaggcgtacacagacggataccagaacattattgtgacttacgagggaggtgcaaaataatgaaaacccaagttgatgcagtaaccgtggaaattgtagggaaccttcttctgtcgattgcggaagagatgggcgtggcgttgattaagagcgcctattccaccaatatcaaggagcgcagggacatttccacagcagtatttgaccctgagggaaatatggttgcccaggcggaacacgttgcgatgcacctcggctcccttctcggcataatcaaagaagtgtacaagaagcacccggcccaggatatcaggccgggggatatgtttatgggaaacgacccatataacggcggcggcacccatcttcccgacatcaccgtgacacagccggtctttgtcggtgacaagctgattggctgggttgcgaacctggcccatcacagcgacgtgggcggtaaagtggccggttccacatccggagatgcggtcagcattttccaggaaggacttaagattcctctcgtcaggatatgcgaaaaggatgaggtaaatgaggatatcatcagtttcctgatggccaacagccgcattccgggagagcgctacggcgatcttcaggcgcagattgcctcgaaccgcgtcggtgcaaaacgtctgacggaaagctttgaccgctatggcgatctgctggtggacagtatgcatgagcttcagaattatgcggagagaagactgcgggcagggatccgtgagctgccggacggcgagtatgagtttacggattatatggatgacgcgggagtcgggcatccgaggccggtcaagatccaggtaaaggttacaatcagaggcgataatatgcatcttgattttgccggaaccgatccccaggtcaacggaccgaacaatgtcacgaaaaatgggcttctcgcaacggtattttactccttaaaagcgctgatcgatcccaccatcccttccaatgccggtatttacagggcattcagcgtcgaggcggagccggggacgatcatcaacgcgacgaatccggcgcccgtgggcgcgcgtatcgacacctgtatgagggtggccgacgttattttcggagcgctcggcccggctgttccggaacgcgccctggccggctgcaactcatcctgtacctccgcaatcttcagcggaaccgatcccgcggatccggaccatttctatgtgtatctggagacgattgcaggcggatccggagcccagagggggaatgacgggctgagcggggtccaggttcatatgaccaacacctccaatctgccgattgaggcccttgagatggaatttccgcttctgattgtccataaatacggattgattgaaaacagcggcggggccggagaataccggggcggactgggaatcgagcggatttttgaagcgatgtacgataatatcaattataccgggctgggagacaggcaggtgtacaagccatggggcctttacggcggcatggagggagccggaggtgaatatttcatcactcgcaccgacggcacggtggaaaagctgatgagtaagtgtaccgatgtgccgctccacaagggggacattgttaccgtccacacaccgggagccggaggttacggagatccgaagaaccgaaaaccggaagccgtcctgtccgatgtaattgaacataaggtatcgatcgataaggcggaagaattatacggagtaaaaatagagaaggatggcagcagcttcaggctggcctgacaggagggacatgatatgagcgttaaagaaattatcagcgagattaaatgtaaaatagatgcggcgggggattgaaacatgtctattttgtggcctgcggcggatccaaggcggcgattttccccggactgtacctgctccagagcgaggccaaaagttttggggcaaccacctatacaagcaatgaatttgtccacgcggccccaaagagctggacagccgctgcatcgcggtaatctgttccctgaaggcaactcctgagacggtggaggctgttaagaccgccaatgcggccggcgccgtaactattgcgatgaccggttccacagagactgggatggctcaagtgggacagtatgtggtgacttattccaacggtgacgatcaggtgtacagcgattccaaccaggccaatgcgctcagaatcggctttgaacttctgaaccagtttgaaggctatgagaagtatgagacggcgatggaagcataccggtacatcgatgaaatcgttgcggagggaaaagaaaagtgtctgccggctgccagagagtgggcggaaaaatataaagacgagccggtattctatgtccttgcatccgggccgaactacggcgtggcatactccatgtgctgctgccacttcatggaaatgcagtggaagcatggcgtctgcctgcacacgggagaatatttccacggcccgtttgagacaacggacaaagaccttccgatggttctgctgatgagtgaggggcgcaccagggtccttgatgaaagatgcctcacctttctgaaaaagtatgccgaaaaatatattattatcgattttaaggaattgaacgcaggaaggatcgcccccgagatagcggagttctttaatcctgtcgtcatgattcccgtggaacgctactatgtggctcagatggccgaggtgaggggccattccatggatgacaggcgttatatgtggaaggtggaatactagagcttgtttgaagtgaatgcagaaagccccggatctgtttgtttataaggattccggggcattttaatccggcggttccgcagacagggaacaatcgctggtgtttgtgagaaattacataaaaagaggcgatttaataaactataatataaaaaatacacaaagaaatcggttttctatcttgactcgactgaaggaaaatgctatccttataccataactaaagatattatataacattttagtatgaatggctgattgggaggggagaatttgtcaaattatatactcagaaggatagggctggcgattgttactttttttggcattaccgttttagtatttatgatttcatcaatggcttcaggcagcccgctggagcttttactcagtaatcaaaacatatctcctgcggaggtggaacgccagcggattaagctgggactggaccagcctgtctatatacagtatttttcctggctgaagaacttcctgcagggtaatctgggcgaatcctaccggaccgggcagcccgtaatgaagatgataatggatggcctggggcctacattgcttctgacattatcagcggttattgtggcctgtctgatttctcttccattgggaattcagtcagccagatttcagaataaggggtgggacaacggttcctccgtgttttcttttttagctacatctacgcccagttttttcctggcattgattttcctgtatctgtttgcggtaaagctgaaatggctgccaatcgggggaatgtacgattccggtaaaccggaaacgccagcctctctgttaaggcacctgcttatgccggccgtagttctggggatgcagatggtggggagcctgattcagtatacccggagcagcatgctcgaagttatgcgtgaggattatgtgcggacagccagatctaagggactcagggagcgtgtggttattataaagcatgttctgagaaattccctgatacccgttgtcacctatttgggaatggagattccgcttttaatcggcggagcggttgtaacggaacaggtgttttcgtggccgggaatcggaaacctgatgataaaatccatcgacagccgggattatccggtagtaatggggatcacggttcttgttgcggtcgccgttctgatatttaacatactgaccgatttgatatacggagttctggatccgagaatccggtacgactagggggtggttggatgaaaggtaataacgaaagaaaagaatcggcggcaggaagctttatcagacgatactgcaacaataaactggcggtggcaggattcttcgtactgctgacaatcgcgctgatcgtgatattagttccgccgtttcttccgttttcagaggcagagattgatgcacttgcattcaatgcaccgccgggtggaaaacatattttaggcggagatgatgtgggacgcgatgtactcagccgacttctgtatggaggccgggtttccctctttgtgggaatcatttccacggccgtcagtgtggtgattggtattcccctcggcatgatcgccgccttctacaggggcgtatttgagataatcgtcatgcgtctgtcggatatcttcatgtcatttccggcaacgatcctaatcctgtttctggtgtcaatgttcggcccgtccattatcacggtgacggtggtgataggcgttctggggtggccgaaatttgcaagacagatttacggcagcgtcctcagtgtcagggagaaagattatattgaaggaggcattgcaatcggggcaagggactcaaaaatcattacccgctatattctgccgaatgcaatcgcgccgatattcatttccatcacattcagaattgcatctgcgattatattggaatcctcactgagctttcttggaatgggagttcagccacctgcggcttcctggggaaatatgctgtataatgcgcagtccattacgattttgacgagccggccatggatgtgggttccgccggggctggcgcttgtaatcacgattctgtcaattaactttatcggcaacggcatgagggatgcgctggatccgaagacaaaaatataagcagtgaaatatttacaatacactaaaagaaagggagaggaacgaatgaaaaaaaggtttgcattgattctggcagcagcactggcatcatcggcaatattaagcgcctgtggaggaaatcaggcatctgagacccaggctccggcccaggagacacagacagatgcgggaggcaaaagcgaagcgggggcggaaaacacctccggccccaaagatgaggttgtgacaatggctattatatcctcctgggatacgctgaatatctataatacctccggaaactacggcaatgctgttgcggatcatatgtttgaacgacccgtaaccagaacgcatgatggagagatccttccaaggcttgccacatcctgggagatgtccgaagacaataagacgatgacattccatctggcagacacggctttatggcatgacggtgagaaagtcacggcaaaagatatcgtatttacctgccgtgcaatgacaagcgaacttgtggataattattaccgctccgcatttaacgtgctggagggtacaaatgacgacggtatagcagaaaatccggaaagcctgggagtggaggcggaaggagattataccgttaagtttacctttaagacagagaaagacccggattcagttttaaatgcttttttaagcttcctgtatgtactgccgcagcatattcttgatacgggcgattacgcatccatcaacagttcttctttctggtcggctccggtcggctgtgggccttttaaatacgtaaaggatacggcaggggaaagtctggagatggaggcatttacagattactatcagggctgtcctgatttcaaaactcttgtagtcagagtggttcctgcttcaaacctgacggcaggccttctgaacggtgatatcgatgttgtggcaatgggaagcatcccgctgtcagactgggagacgattaaaaattccgatcaggtggtggcggcatccgtcgaggactactcctatcagtatatgcagttcaatctgtcagacggaaaccagacattccaggatccgaaggtaagaaatgccattgatatggcgattaataagcagatgatggtagatcagctgatgatgggagagggccaggtagcggtcggcccgatgccgaaatatcatccgtactacaatgaaaacattgtcgctaatacatatgacccggataaggcaaaagcgatgctagaagaagccgggtttgactttgggaaagagtatttgatgcttgtaccgaagggaaatcaggtcagagagcagtcggctcttctgatccagcaggatttacagaagatcggcgtaaaggtcaagattgaaacatatgactttaccactcttcttcagatgctgcgggaagggaaagaggacttcggcctgctcggcggcggcagcaatatcgatccgaatgagagcagcgttattgtgaaaccgcacgatccgaggaactattcactccttacggatccgaagtggtttgagctggctgacgaaggcgcgtccaaggtgacgaaggaagagagaaaagagtggtatgacgcataccagatggcgcttgtggaggatcagccgtatatctggctctatcatcagaataacctgtgggcatacagcaagcgtttgaaagaaatcccgattgaagattttgtatggtttaactttgagagctggaagtggaaactggctgactaaagcttggccaaaaggaagtaaaactgaatatggctccggcaggctgctaatgagaagaacagtgaagcttgtctgtccgtcacggcatcaggccggagcgggaggaaaacgatggagaaggacatgatagcggatatcctcgggtatctggatgataatttccaagaagatttaggagaagtgcagaaattcatgcggctgaaatcgatttcggcaacgggggaagggatccgggaaacagcagaagccgtaaaagaaatgattatccgggccggaggaacgtctgaactgctggaaacacccggaaatccaattgtatatggaagaatggatgaaggcgctgattatacgcttctgatttacagtatgtatgacgtgcttcctgccgaggaagaagactggatatcggatccgtggatggcaaaaatccatccgttccgtgactatggagactgcataatcgggcggggcgccgttaataccaagggaccgacggccgcatttttccgggcgctgatggcataccggaagctcagagagaagcttcctataaatctggtatttctgatagagggggaggaagagctgtcttctgaatccctgcaggattttctggaagagaataaagaaaaatttgcagattgcgatgccatgtttttcccgtctttcggagaagagaaccggattgcatctatctttatgggagtaaaaggaattatcagcttcgagctgagagcaaaaggcggaacatggggagggccggtagacagagggattcatggagcctttgccgcctgggttgcaaatccggcctggaggcttgtgaaagcgctgtccaccatgattggagagaatgaaaacgatatccgtatagacgggttttatgatggcatcctgccgctggatcctgaaaaagagcatgcgctgagagagtcagccgatctgctggacgaagaggaatggagaacggcttacgatgtcgataaatttaaatggaagcttgagggactggaattgtggaaaaagatgctgacggttcccacactgaatattgacggcatccggggaggatatatcggtgaaggttcgaagactcttctgccccatgaagcggcagtcaaaatggatatccgtctggtgcccggaatggatcccaaaaccatgttaggcaaactgcgaagacatttggacagccatggatatgaagatattgagattgtggaattcggcaaggcatattacccgtccagcgtaccttattattcgacctcggtacagacattaaagcgcatgtatgagatgatgggggccagaccgcagatatggccgtggaaccccggctccgctccctattacctgtttgagaggatactaggaattccttacgtcaccggaggaatgggtcatggctcacgtcagcattcaagcaacgagtactgtacggttaagggcgttctggatttcgaaaaatcgatgatatattatcttacattgtttccggaaattgcggatgaattgaagacggcagctcacgattaagaaaagagggatggaatgaaagaggacgttattttacaggtgaacggactgaagacatatttttttgacagaaaagggaaggtgcctgcagttgacggtgttgatttcatgatccgaaaaggagagacattgggaatcgtggggagtccggatgcggcaagagcgtaacctcaatgtcgattcttaaactccttcctccggagggaaaggtggtagaaggtgaaatcctgtttaaagggcgggatttaactaagtgtacttcccgggagatggagaaggtgaggggaaaagaaatagcaatgattttccaggaaccgatgacatcacttaatccggtctatacagtggggaagcagattgaagaaatgctcaggaaccatcagcagatttcgaaaaaagaagccagggaaaaggcgattcacatgctggagctggtaggaatcccatcaccggaaaaacgggtggatgagtatccccatgaattgagcgggggaatgcggcagcgggtcatgattgccatggctctctcctgcaatccggagcttctgatagctgatgaacctacgacagctctcgatgttacaatacaggctcagatactggaactgatgaaagatttgaaaaagcagatgaacacatccattatgatgattacccatgatctcggggtaattgcggagatggccgattatgtacttgtcatgtatgccggaatggtaatggagtattgcgatgtcaggctgctgtttaaaaacccgctgcatccgtatacaaaagggctgattaatgctctgccgagtattagcgatgcaaaggagatgctttatgtaatcgagggctcggttcccagtttgtatgatatgccggccggctgccgtttctggcccagatgtccgtatgcagaggaacgctgtaaaaatgaagtgccaaagcttactgactgcggagacagaaaagtcagatgttttctgcacgggcagggaaagcagggggaaaagtatggctgaaacattattggagattaaagacttaaaaaaatactatgaactgaaatcaggctttcttggcagggataggcgggtggtaaaagcagttgacggaatcacactcgctttaaaagagggagaaattctcggtgtggtaggagagagcggatgcggtaaatccactcttggaagaagtattctccgtctgattgaaccgacggatggggaaattctgtttgacggaaaaaatatacgtgcgctgaaaaaagaggagcttcgtcaggaaagaagcaatatgcagattattttccaggatccgggagcatctttaaatccccgtatgacggtgggagaaataattggggaaccgattgagctgtttggtacggagacaggggaagcgaaagaagagaagatttacaaattaatggatttggtcgggattaaccgttcatatatccatcggttcccacacgaattttccggagggcagagacagaggattggaattgccagagcgctggccgtcgatccgaagctgattatctgcgatgagccggtatcggccctggatgtgtcggtccgggcccaggtgcttaacctgatgagggagctgaaggaaaaattaaatctgacctatatttttatttcccatgatctcagtgtcgtccaccatatctgtgatcgtgtggccgtaatgtatctgggaagaatagtggagattgcatcaaagcaacagctatactccaatcctgtgcatccctatacaaaagcgctgctgtctgccataccgatcccggatccggaattgaaaagggagagaattataattcagggagacgtgccaagcccggccaatcccccgtcaggctgccatttccataagcggtgtccatacgtcaggccggagtgttccgacgtgatacccccttatgtggaggtggaggaggggcaccatgttttgtgctgcttagcaggaaaggaaacggtggagtagggtgaagacggatcaggatatcaggcggtcaatcgaggaaaaacggcaggattatattgatgccgcgctttttatatgggaacatccggagaatatatttgaggaataccgttcctccgcatgccttgcagagcttttaaaaaagaacggtttccggctcagagagaaagccgcaggcctggatacggcctttgtggcggagtggggaagcggccggccgatcatcggatatatgggggaatttgacgctctgcccggtttaagccaggaggcggactgcctgaccagaaagccggtaacagagggcggtcccggacatggatgcggacatcatatacttggaaccgccgcggtggcggctgctgttgccaacaaagaattcatcgagtcaaataaaataaccggcacggtccgcttctatggatgccctgcggaggaaggcggagccggaaaggttctgatggctcaggcaggtctgtttgatgactgcgatgccgctgtcagctggcatccgacagatgataatgggatttggtcaattaattttcatgcacagcagaaggtggaatttacttttaccggtaatgagaaaaaatcggccaatgcaaaagaagccatgcagttattttatctgggcgcacagaatctgagacatcatcttgataaatgttttgtagtgcgctccggaattcttaaaacgggggatgaagagggcggatatccgctggagtctaaagtcctctatgcatacagggcgcacgtaagcactcaggtggaggcagccgttgccagactgcatcaggtggcggaaggagcggccatgattacagggtgtaccctgaagacagagttcaaaacagggacaacagagctgcttcccaaccgcacgctggaacggctgatgtatgataaatatacggcaaccggcactgtggaaatgacggccccggattgggagtatgcagccagaatgcatcaggcacttcctgaaaatggagaacgtgccacgtttgatttgatgcgccttttatacgcagaacaggcggaagagataattgaacaggtgaaaggaaaagcatataatccatatttatatcccttcagggaaattgaaatccataaacctggttcgacggatatctgcgatgtcagttggtttactccgacagcgcagtgtgtatctgcctgttatgtcaaggacacattaggtcattcgtggcaggaggtggcacaggggaaaagcggcatctgcatgaagggcatgctggttgcggctaaggtaatggcgctgaccggggcggagctgttcagaacgccggagacgcttaaggcagtgagagcggaattctcagagagaagaggtcagaaaggataccggcccctgctggccggagctgtaactgaaaaccgggaggacacaacgtgctgtgagaacttttctgaaattcattttgtgggaattgaagacgacggacttgcctcacggcataccggttctgccggaaaccttggcggtaatgcactggaagcaatgcaggcttttgaaatggccatgcacgtgatgggaaaatatttatccccctttgcagaatcagacagagaatattggaaacaggcgacgaagatatcgtccgtgttccatgtctggccaaactggaaatttcagtggagggggatgagagcggaggcagatatatcagacgggctgccaaaggcgccgccctgatgacaggctgtaaagctgagttttattcaggggaataaaaatttgttttgccttttacctaatgatgttatataatgtttcataagagcattatataatgatctatgcagatcataataaaaataaaaggaatgatacagatgttggatggaaaggcggtaacgccactatatgttcaattgatgactgagattgaagcaaaaattatgaaaggcgtgtatcagcccggagaaaggctccagtctgagagcgagatggcgaaaacattcggcgtcagcattatcacggtgaggaatgctgtcagcgcactggtcgacaagggactggtggagaagaaacagggtaagggaaccttcgtctcaaagccaaagtttacaaaggacatcaagaaacttcagagctttaccgagatgtgcgagcatatggggatgaagtccggcggacgtatgcttgagaataagctgatagtggcggatgaaaagacaagaaatcttctggggcttgaaaagggcagccaggttgtctatatttccagggtgcgttatgcagataatgaaccggtggcgatagagaacaactattttccgctgaagtatgcatttcttctcggagaaacctttgacagcaactccctgtttgagtttatgaaagataaggcaggtgttatggtcgctgtttcggaaaaatggatagagctgtgcaaggccacaacccgggaagcggagctgttacagcttaacaagggtacctccctgctttatataaagagtgttgcctatacccaggaaaaagaaccaatatatgtgggcactcagatattcaacggggacagatgctccttctatgtatgtgagtcaacaggaatataagaaacaaagagtgatatgggcggcgtccggtaattatttaccgggcgccgttttgtaattgagggcggtgacctgttgtcagagatttaacggaggttgggaggacgcgtccggaacggaccatgcccggtgtggtgaggagggctgtctgagtcttccgtccccgattggaggttgttgtgagggggaatccggccggaatgaattcttacagggaccgtttgcactcttcgaagcgcatagccgtgctaaattcgaaaaaacctcattgaaggcggtgacctgtgcgcagagcgtacaggttatcgttctggctttagccagttgaaggcattggagtttttcgtgttccgaaaaatgataatgcctgaaacaggaaaccacctgctttgcgggtggtgcagcaagtgcttatagcacaaaaatcacctttccgatagaatagagttgttcaagctactatctaagaaaggaaaggtgattttaatggcacacaagaaacatgatatggcacatacaaagtggatgtgcaaataccacattgtgttcactcctaagtatagacgaaaaatgatttataatcaatataaagaaagcatacgagatatattaaaaacgttatgcggatataagggagtggaaatactggagggtcacttaatgccagatcatattcatatgctggtaagtattccaccgaaatacagtatatccagctttatgggatacttaaagggaaaaagtgcgctgatgatatttgataagcacgcaaatctaaagtataaatacggaaatcgtcacttctgggcagaaggttattatgtcagtacagtaggtctaaatgaggcaacagttaggaagtacattcaggaacaggagaagtatgatatagcaatggataaactgagtgtaaaggaatatgaggacccctttaaggggtagccggtattacaaacgccctttaaaggggggcgacgagtcaagggcatagtggcttgaacagagtgaaagccagcgtctttaggcgctggccggtaactgtccccttataggggcgagcaaaccacccgtttgacgggtggtcatgattaagcacggatgggcttccatgtcccctccagaattgattccgcctacttccccggggcagattttcgccggggaccgaagactcaggcggaggttttcgcacaccggacatggtccgttccggccgctgattgtctccaacattaaatggggagggccttgtcgcggccactacgtgtttcaggctggctgatatcaaaccttccgcgattctttcataaaggcgcattgaacatatcgtgcttcccgcacacggaagctcttagtggccgcgacaaggtccgccctccgcacttaacgcgtgagacagtcagcggccgcaggccagcggacggggcgatcccccggcggagtctttcgtcctagcgaaaacctggccttggggcggaggggaagataaagtcagcggatgccgttgaaatccatcgctgattagcgaggtcctgtcgagcttagcagcgcgatgcatttcacagagcgggagtgtgctccgcagactttatcttcgcccgcagccccacaccacgataataccccaggacgaaagactcatatacacaccccaccaccccgtccgctggccgtaccggcggcgtcctcacctgcttaactaaatctccaatgataggtaaatgcatattattatttgatttctgtctgttaaagtgctgaaatagttttaaacaaatagaaaaaagtagggaaaacagagagggaggataagagaaaatagcttgagatgagtaaatgtatacaataaacttagcaaaaactagaaaatataatttaatattgacaaaaggattgttccgatctatactaaaactaaattttatgaaacttatttttttgaaataaaaaaatatgaaacaaaaatacaaaacaaaaattcagaacgaaaatgaggactgaaagtatggcggaaatgaacaggttctgcgttcatcgcagaaaagctgtgtgttaaattccgccggaaacatggtataatgaagcggttaaatatcgaatccatttatattacaaaagaagaggaaatgtatatgtcatcaccagtattaattgagattaaaagccgctatccccaaatgaatgaagctatgcgcagaattgccgattatgtaatatcgtcagagagtgatattatctatctgaaagccagcgattttgcagaaaaaagcggagtcagcactgcatcggtcagccgtttcgtaaaacttctgggatataagaattttaatgaattccgtttgaaaatggcagtgacggaagaaaagaatgtgaatgaaaaaccggaagaaaaggacaggctggtatataacggtgaagcgataggaaaatcaccctacgaagtcagcaaaacaattttttcaaaaagcatccgggaattggaagacacctggaatatgatggattttgacattttggagccggttgcaaatttaattgacagagcaaaccggatcgtggccatcggagtaggccgctccaagatcacaacggaggctctggtgtcgagattgtaccgtattggctattatattgtggatttttgtgattcccatgagattgtgaatattacttctattttaaaagaaggggatcttttaatcgcagtcagcaattttggacaaagcaagtctgtggtggagggcgtaaagcgcgccaaacgcagaggagttactgtggtgggaattaccagtgtaaaggattcgccgctggctcaatattctgattatgtgttgttcagcgcctatgattacgcctcggacaagatggggaagctttacgagccatccagcgaaaatgtggcacagcttgttttggtggattgtctttatatgatggtggccacaaagcatgagaaggaaaatttatcccattacagggcattttcagaagagatcagtacggagcatgttaataaataggagggagcatgaaaatgaaccgattgcttaataacccggaacaggtagtagacgagatgctggcaggctatattgcaagctatccggatcgtttttgcaagctggacggatatcatgtgcttctcaataaaaatgagaaggataaggtttcaatcgtcatcggagcaggaggaggaaacgagccgtggcccatcggatacgtgggagaaggactggcagatgcatgctccctgggaaatgtttttgctgctcccacggcaaaatcaattttaaatgcaatccgttatgttccgaatgaaaaaggcgttttatgtattgccacaaaccatgccggagatgtgctgaattttgagcttgttgcaggtttggcagagatggagggaatccatacgagacagatttacgtatcagatgacatcacatcggcagaaaaaacacagcgggaagagcgcaggggaatcgcaggcgtctccctgatagtgaagattgccgccgccgcttctgaggcaggtcttagccttgaagaggtgtatgaaatcgccagtatggcaaacaagaatatttatacggtcagcgtcacaacctcaccggcctatattctggagacaggacagccggcttacgagcttccagacggcgaaatggagtatggtatgggctttaacggtgagaaaggaatagaacgaactgctctctccacagcggatgaggtaatggagcggatggttcagatgctttgggaagatatgaatctggaaccaggagaggagatagccgtatttttaaatccgtataaggccactacagtcctggaatcctacacattaatgagaaagtgccttgaactattagaggaaaagggaataaaggtctatgattcctatgtggattctctctttccgacccagggggcgggcggtttttcactgacctttttaagaatggatgaagcatacagaaggtattatgaccagccggctgattctccgctttttaagaagggaaaggtagtacataaaacagaagctggccggacaggcacaaagagcttttatggcagtacaaagaggccggatgcggcagaggctgaagggaagctggcagtgcagcgccgggagaaccaaaatgtggaaggacagaagacggacagccataccttaaatagagaagagttaaaatccatgatgctctatgtagcagaaaaaattgtagagaatgagccgtatttaacggagatcgatttaaaaatcggagatggggatcatggaacaggcatgaagcgcggattctgcgaggtggcaaaagcgcttcccgggtttgaaccggtttttgcagaggatgtgctgcagttcgtgggaactacgctgctggataccatgggcggtgcgtcgggagttctgttcggaacggtatttctcagcggactgaccaggcgggagcatcatgaagcagtcggaataactgatttttatgagatcttttcccaagcgttagaggcgctgaaacagagaggccgcgccagggtcggagacaagaccatggtggatgcattagagccggcggtaaatggactaaaggcagcggcagaagccggggatacgatgaaagagggacttaggaaggcggagcagggagccagggacggtgttgaatatacaaagacagtaaaggcccggttcggcagagccagatattttggagaaaaagccataggcttacaggatgcgggggcaacctccgtctggatcatattccgctctatgcatgagtggatttgtgagaataaataaaatatataaaagccggaacaaccggcgacggcgttttccgaacgctgcaggaggaaagaatggttataactgtaactttaaacccttgtgtggacagaaccattgaagttgaaaaatttcaatatggcgggactaataaggtactgatgacgagaaacgatatttccggcaagggaatcaacgtaaatcttgttttacagcacctgggaattgaaaatctggctaccggctttgattatcaggaggacacaaagaagctgaccggatttttagaccggcttggctgccgttataagctggagccagtggagggaagcttaagagtcaatgttaaaatctttgattgcgccacctctgttatgagcgagtttaatgagcggggctcggcagtaacagcggagaatgtggacagctttttgaagcttttatatacccagatggatctggcgtcagtgattgtggtggatggttctgttcctccgggcgttccagaagatatctatgaaagaatcatagaagaggcaggaaaaaagggactgaaaactattctggatgcgtccggagagcttcttaaaaaggggattaaggcaaagccgttcctgatcaaacctaatcaggacgagctgggcgccacctacggggtggcggtacagaatctggatgacattatccggacggccaggaaggtgatagaggaaggagtaacctatgtctgtgtctcaagaggcagccaaggcgcagtgcttgtaagcaaagagcatgtctatgtggcagaaccgctcacagtagatattaaaggaatacagggagccggagattctatggtggcaggcttttgttatgcaattgaaaagggaatgaatgagacagatcttttgcgccatgcagtggcctgcgccacaggttcccttttgcatccggggacacagctttgtgaaaaagaggatatggaggccatgctttccagagtccgtattgtagaggtttgacaggaggaaataaaaatggcattgatgacaacgaaagaaatgcttctgaaggcgcagcgggaaggttatgcagtgggcgcctttaatgcagaaaatatggagatggttcaggctgtgattgaggcggctgaggagatgaaggcgcctgttatcatccagaccacgccagggactttaaattatgcagatcccgagatgttctatgggatgtgcgccgcagcggcccaaaaggcttctgtcccggttgcacttcacctggatcacggcaacagctttgaaatggcagcaagggcattaaaagccggatacacctctgtcatgatcgatggctctaaagaggaatttgaagccaatgtaacactttcccgaagagtggccgagatggcccatgctatgggaatcccggtagagggagagttgggaaccgtgggcggcaaggaagataaccacgaggtaaaggacagcgaaaaggcatatacagatcctgaacaggccggagaatttgcagagcggacaggtgtggattcattggcggtggggatcggtaatgcccatggattttataagggtgatccaaagctgcggtttgatatattggaagagacaagaaaaagagtttcaattcccatcgtgcttcacggggcatccggtattccggacgaagacgtaaagagggcaacaggacttggaatttgcaaggtgaattttgcaacagagctgagagacgctttctccaaaggcgtaaaggcgtacttaaaggagaatccggatacctatgatccaaagaaatatggggcagccggcagagaggctgtaaagaagctggtgcttcacaagcttgaggtgttaaactgccagggaagagaaggataagagcagtgggcgtaatccgggggaaaagctccgggttcacataataactatattaatgcaatcaaggaggaaaaaaaacaatgagaaaaatgatggcacttgctatggcagctatgatggcggtatcgctgacagcctgctccggcggaagtaagacagcagaaacaacgaaggcagcagaaacaaccaaagcagcagaagcagaggcagcagaagctacaggcggggctgaagcaaagacggcagaagatatcacagttggtgtcagcctgttaaacagcacacatgtattttttaacaatatccaggcagccatggaagagcaggcggctgagtacggatggactctggatgtgcaggatgctgccggagatgccaacaaacagttaagccaggttcaggattttattaccaagggtgttgatgccattgtaattgcgccaaccaattcagccggttccaaatccatgattgagctggcagaggctcagaacattcctgtatttaccatggatattaaatctgacggtcaggcagtaagccatattgcaaccgataataaaaagggcggcgagctggcagcacagtacctggttgaaaagattctgacagagaaaaaaggaacagcagcagtcattacttattctgagattgagagctgtgtggatcgtgaaacaggatttaccggttatctggaggccaatgcaccggatatccaggtagtggatattcagaattattccggcgaccagcagaaagcggccgacgtaatgcagaatatgctgttaaagcatgatcagcttgatgttgttttctgtgtaggcgatccggcagccatcggagcattatcttccatcacggcagcaggcgcagatacaaagatcattggttacgacggaaatccggaaggcattgctgaaatcaaaaaaggcggcagctgggtagctgatgttgctcaggatccggtagcaattggaaagaccacactgagcactgtaaaatcatatctggaaggagcaacaccggaggcagaaatcctcatctccccttatatgatcgatgctgagaatgcacaataattaaaacagacagaaagcattgtctgattgccggggggcgccgactttgactggtgacagccatggaggcgccctctgataagaaaggggaacgaatgatgcagggagtccaggaaacaccgtttgttgaattaaaacatatcagcaaatcatttccgggtgtgaaggttctggaggatatttccatccctttttaccgcgggaaggttcatgtcctgcttggagaaaacggagcaggaaaatcaacgatcattaaaatgatttcaggcatttaccagccggatgagggcgaggtattaatagaggggaaaaacgagcatctgaccaatatcaggcaggcccggaagttcggaatcagcgtcatccatcaggaattaagcgtgattgatgatctgagggtttatgagaatgtctttttgggacgggagttaaagagcggcgggtttgtcgatgcagcccgtatgatccgtgagacaaaggaactgatggaagctattgaaattgatattgatccaaaggcatatatcagggacttaaataacggggcaaagcagatggtggaaatcgtccgggcggtatcccagaacagcaggatggttattatggacgagccgaccagttccctctccgatcatgaggtacaggcgcttttcaaggtaatgagaaagctgaaaagcgagaatgtagctatcatttatatttcccaccggttaaaagaaattttggagatgggagacacgctgacggttcttcgcgacggaacgctggtggataccgtaccggtcagtgaggtgacagaggataaaatggtggcaatgatggtgggacgcgagatttccaactattattttaaaccggagccgccaaaaacaaaggaaatcgtatttgaagtccggaacttaacgagagccggaatgtttaacaatgtgtcatttaagctctataagggagaaatcctgggagtggccggtctgattggcgcagggcgcacagaggtcatgcgggctgcctttggagcggatccttatgacagcggggagtgcctgatggatggaaagtcatacaaggcgaaaacgcccaaggatacaattaaaaaaggacttggcctaatccctgaagacagaagggggcagggccttttactggagaaaaatgtaaaggaaaacacatcactggcatcgctttttgccaactccaaccatgggtttatcaactttggctgggaaaagcaggagtcagtgtcatatatagaaaagctgaggattaagacaccgtcggagctggcgctgcttaagaatctttcgggaggaaaccagcagaaggtggtcattgccaaatggctgctggccaagtcacggattctaatcatggatgagccgaccaggggaattgatgtcaatgcaaaatcggagatttacgctttgatgaaggagtttgttgaaaacgggggaagtatcattcttgtatcctcggagcttcctgaaattattggatgctcaaaccgcattatggttatgcgggaaggagtggtaaccggattcctcgatcaggatgaagctacggaagaacgggttatgcagtttgccagcaagggaacgaatcaggaggaaaagtaaatgagcagtcaagtaacacaaagcaaagtgaaagcgtttgctgttaataatacaatgttattttttgcagtaattctgtttgctgcctgtatgatcggggtgcctcggttcgccacgggcggcaatctgatgaatattttgattcaggtgtcaattaatgccctgattgcctgcggtatgacatttgtcatcctctcagacggaattgacctttccgtaggctctgtggcagcaatcgcaggtgtggccggagccagcctgattaagcagatgccggatgccggtattgcggcatgtattgctgtgatactggtaacagcagttgtggtcggaacaatctgcggttctatcaacggtttttgtattgccaagttgaacgttccgccttttattgccacactggccatgatgaatgcagccaggggacttgcttacgtatttaccgatgccaaaccagtgtttggcctgccggacagcttcggatgggtgggacttcgcagcatcggagttattcccgtatcaattgtattaatggttattgtaattgggctctcctatctggtgctctctaaaacatgcttcggccgttatatttatgcagtgggaagcaataaggaggttgcgaagctgaccggtatcaatgtaaccatgacccggttttctgtttacgtgatttccggtattctggcagccttagcaggacttgtgctggcctccaagcttcaaaacggacaggcgacagcggcaacaggctatgagctaaatgccattgcggccgtagccatgggaggaaccagcatgtccggcggacgcggcggaatccctcagaccgtggttggtctgtttgtaatcggtattatcaacaatgccctcagcttactgggcgtttcttcatactggcagacggtggcaatgggcgctatcatcctggttgctgtcattattgaccagttcagaaagtaatgttttgataaacggctctgggatttgcatcccagagccgctttgtctatagtctgcggcgtccggtaattatttaccgggcgccgttttgtaattgaaggcggaggttaggaggacgcgtccggaacggaccatgtccggtgtggtgagggggcgggctgagtcttccgtccccgtgggcaggttgtcgtggagggggaatccggccggaatgaattgctgcggggaccgtttgcactctttggagtgcgcatcgggatgctaggctcgtgagggacctcgctaagcaccggcggactcccatgtcccctccgcaattgattccgcctacttccccaggtcaggctattgtcggggacggaagactcaggcgaagatttttgcgacaccggacgcgtctctaaccttaaatggggaggaccctgtcgcggccactacgtgttcccggcaggctgatatcaaatccagcgcaattcttttataaaggcgcattgtaggcatatcgtatttcccgcacacggaagctcttggtgaccgcgacaaggtccgcccccgcacttaacgcgtgagacaatcagcggccgcaggccagcggacggggccgatacacccggcggagtctatcgtcccggcgaaaacatggccttggggcggaggggaagataaagtctgcggatgccgtctaaatccatcgctgattagcgaggtcctttcgagcttagcagcgcgatgcatttcacagagcgggagcgtgctccgcagactttatcttcgcccgcagccccgaaccacgacaatcttcccccgggacgaaagactcatatacaccacccaccaccccgtccgctggccgtaccggcggcgtcctcacctgcttaactaaatcacccgaattgttactgtttgtaatgccggaagaaataaaactgaaaaaatactattgacaaactcccggttgtggactaatattatgtcataacattatataatgatatataatcaattgggcggaaagaggagagaggataatgagagtaatcggtattggggacaacgtatgtgacaagtatgaacatctgaaaacgatgtttccgggaggccaggcgctaaattttgcagcttatgccaaaatgctcggggccgattcctcctacatgggtgtctttggaaatgacgcggcagcggctcatgtgatcaggacactggatgaactgggagttgaacacggccgttgcaggcagtatgaaggggagaacggctgtgccagggtaaccttgacaaatggggaccgcgttttcctgggcagtaataaaggaggagtggcaaaagaaaaaccgcttgatttgaccggagaggatctggaatacataaaagggttttctatcatccatacgagcaacaacagccattttgacagccagcttgcaaaagcagcagccacgggcgtaccgctgtcctatgacttttccgggcaatggaccgatgaggagagggttgccggggttgccccatatgcatcctacgtattcttatcctgtggttcggttacatcagaagaggcacgcggtatctgccggaatatgcatgagcagggctgccggatgattatagccaccaggggcagctatggggcaatgttatttgacgggaaggatttctatgaacagccgccgaagctggtagaagctgttgatacgctgggggccggcgactcctttgccacggcctttctgctctcttttacggagagccttaagagagcgccggaacgcatgaaaaaggatagcggattttaccgggaagagcttaagaaggcaatggtacggggggcggagtttgcctcgaaaacctgtcttgtcagaggagcctttggccacggtgttacatattagcagataatagatgaaaacaaaaaagatttcaggaggaatgaaaatgacaaaaacagtaaaagaaatcgtagcggaaattaaaacaaagatggatcaggcaggcggcctcaaacacgtttattttgtggcctgcggtggctccaaggcggcaatctacccgggcctttaccttcttcagagcgaggcgaagacatttggcgccactacctatacgagcaatgaatttgttcacgccacaccgaaagaactggattcacgctgtgtagccgtcatctgttcccttaaggcgacgcctgagacggtggaagccgtaaagacagccaatgcagccggggcggttacaatcgcaatgacaggctctatggagaccggaatggcgaaagccggccagtatgttgttacctattcaaatggcgatgatcaggtatacagtgattcaaaccaggcaaactccctccggatcggctttgaactgctgaaacagattgagaattatgagaattacgacaaggctatggaggcctatcagtatattgatgagatagtagaggcaggtaaaaagaatgttctctacgcggcaacggagtgggcacagaaatacaaagacgagccggtattctatgttctggcatccggtccgaactatggggtcgcttactccatgtgctgctgtcactttatggaaatgcagtggaaacatgctgtctgcctgcatacaggcgaatacttccacggaccgtttgagactacggataaggaacttcccatggttcttctgatgagcgagggaagaacgcgtttcctggatgaaaggtgcttaaagttccttgaaaaatatgcaaaaaactatattgtaatcgattttaaggaattaaatgcaggaaagatagacccggcagttgcagaattctttaatcctgtcgtgatgatcccgattgagcgttattacgtatcacagatggcggaggtaaggggccactccatggatgagagaagatacatgtggaaagttgagtattaatatatcttattcatatggaagctctgagcggccgcaggccggcggacgggcgatacccctggcggagtctttcgtcccggcgaaaacctgaccctggggcggaggggaagataaagtctgcggatgccgttgaaatccatcgctgattagcgaggtcctctcgagcttagcagcgcgatgcatttcacagagcgggagtgtgctccgtagactttatcttcgcccgcagccccaaaccgcgacaagcttccagcgggacgaaagactcatatacactcaatccgctggccgccccgtccgctggccgccccgtccgctggccgccccgtccgctggccgccccgtccgctggccgccccgtccgctggccgtaccggaggcgtcctcgcctgcttaactaaaagtcgtctaaactcaagcttgtatattgcttttttatcgatagttattatataataatatatatctttatatctacagttattagcactgaaagaaacggagtatattatgttagatggaaaagcggctattcctctttatgttcaattggaagaacagattcaggaaaaaattctttccggaatataccagcccggcgagaaacttcagactgaaggggagatggcaaagacgtacggcgtcagtatcatcacggtcaggaaagcagtcggcggactgatagataaagggctggttgaaagaaagcagggcaaggggacatttgtcagcaaaccaaaatatatgagagatattaagaaagtccagagcttcagtgatatgtgccgcagtatggggctggagccgggaggccggatgatcgagaacaggctggttgtgccggaggctgagattgaggagaacctggggcagcagaaaggaatgcaggctgtgcttatttcacgtgtccggtatgcggattacgagccggtggcaattgaaagcacctggtttccgctccggtacgcctttctgctcgatgagacatttgacaataactctctgtttgacagtctcaagaagcgcgaggtggcggtcgttcattccacgaaaaaaattgagatatgccgtgcctctgccagagatgccgccctgttaaatatgtccaggggtgatcctcttctctatatcaggagtgttgcgttaagcggtgacggacagccaatctatgcgggaaggcagatgattaacggggagcgtttttccctgcagatcaacgagaatacggaactgtagagcgccgtccgagaggccggccatatatctgtctatatttatatatttgtaccgtgaatgacgagggtttcgggagatttaaagcttccggaatcctcgtcattaaattgaaggcggtgacctgtgcgcggagcgtgcaggttatcgttgagtggcaatgaaaagttcgcgaagcgtgcttttcgttgttatggaataaaatgcaacagttcagtcgtcatgagcagttacaaaaatatgccataaaacaggatgcgttcagaaaagttatttgtgaaaattgcgcaggaacctattgacaacataatgatacatgatgtaatataatgatatataataaattggccaatgaaaattgttaatgctgttgaaaaacagcctatgggaatgaggaggagaaaatgaacgccgatatcttcagctatgaaggtgtacggggacaacgtatttgagaaagacgggataaggcgggacaggacgggagacggcgagaaaacccgctgtttatgcgggaaacggggcattttcaaccgggacgggcccgcgatggggccgcaaattatcagacaacttgagcgaagggcgtcgaggcgatcggcgtccttttttcatgccctggcgagccctgggaggcccaggaacggcggcggcgcgtcgggcgcatatcaacccgccgaggggcgaaaagccttgatacaaggccgttttcgggcgcaagaagggccgctcggcccgtcccggaagtcacagcagcagacaaagaggacgggcttcgcggcccttgaggatagtatagcagacgaggccccggaaggcaagcgggcgaagcgtgcaaacagggcgttaaaccgtgcaggaattaacagcagggggcaaaaacaggggttcggcggcgcagatcggcggggcgggcgcgttacgagccgttaaacggggcgttactcacagggcggcgacggagcggaaccaggggcaaaacgcccgctcgcaattctacatttcccccaaacccgtgtagaattgtagaattgcccggaatacgcgggttttccaggggtcgggacgctctcccggcctcctttgcaattctacagacttttgatttattttttaatcatagcagggcaaaaaaatcaggcggttccgtcgcgggcttcacggctctcggcagggccgcttttttcgtcgtcgctctcgtcgaaatatgtccagaagatagactctttttccccgtcgccgaggcgcgtgtatttgaagtgcgtcaagtcaaagatctccttttttgcctcctcgggcaaaagccggaacatggcgacgaggtcggcttccatcgaagacagcgggatgccgtcgcagctcggcacggtgggagtgtttgggctactcccgttcacaagatagtcgattgttacatttagcctatgagctactttgcgaacgctttcaatattaggggtttgtgtttcccagcggcgaatagtggcgtttgcaaggccacattcccgctcgagctgcttgacgttcagaccttgctcttttataagttcgtgaactcgttcaaagatagtcatagtgaataaactcctttttcttagtggataggctatttccctattgacaaatagtgaataggctactataataggattagattaaaaaattaagcaaaacaagcataccacaccgaccacaaaaaggaaagcgtaaaggaggccgaacatgagaaacggcagaaagccgaccaggaagcagaagatcaggctcgggcaagcgggcctcgcgccggagaactggctcgtcgtgcggcagaagccagacggggaactcatcctcctccacaagcgcacgaacacgatccgggtcgtcccctcgctgggacaatgacccacacaacgaaaggaaggagcagcagcatgaaccgctacaaagtcacagccaccaggagcaacggcacggagctctccgactacttcatcgaggcgacggagggtgcggcccggaaaacctttaaggagtgctacaggaatgaggagtacagcgacgtcaaggtcgagctcgtcgcggagtacgtccaggccaccaaagagcaggaacgggaggccctggcgaaaatcgtcaagatcatcgagggcctgggcccgggctcctatgtggggatagccttcgaggggtgcttcaaggatgccgaggacaacatcgagaacgacttcggatgcagcatgaagcagaagctcgagtcggcagagacgcggctcgcggatgccgaggaacggctcaaggagctggacgggctgatcgcgaagctgaaagaggaacggaaggccctcgaggagaagctcgcgaagcagagcctcccggagtggcttcggtttgaccttcacgccctcgccgccgaggacagcgccgccgcccggaagcggatggaggagagcgccgagattatggcggaaacggcagacaagccccgggacatcgccttcaagggggcggtggagtcctaccgcaaggcgaaggagcggcgcgagcgttgcgagcgtctgctcgctggcctggatgagaacgcgccgacgccgaagcaataagccgaaacgcccctcggggcgtcatcgagggggagcccgccctcgatctgatgatggcagggcacggaacaacaggaaggagcagcagtatgagaaagatgaagaagatcaacggctacctcgtcgtcaagttcaacgcccgggagctccgggagtatgagggcacggccctcggcgaatacggcgtcatcgacgccgagctctacaccggcatcctggacatcgaccggggcgcgatggagtacgacaacgcgggcagcatggaggaggccgtggagctggcccggggcctcgagtcggagcttgacaccgaggagcccgaggtcaaggtcacgatcgtcaaggagaccgacgagaccaccgaggaggaggaagtggacgcgcagcagatgatcgccggatgggagaacaccctccgggggcaggtcgcgagcccccactacaaggacgtggacgcacggacggcagcgcatgagctatacggctacaaggccgcgctccgcgacctgggccttctggatcgggaggactgcttcgttctcccggacaccttcggggcgtggccgggccgggaggagcggacgaccttcaagcacctccacccggagctcaagcgtcaccgggagacggcgcagatctacgccctggggctggcgctggcggcggactgtccgcccaacgattgccgggtttacctcaacatcttcaacggggcccgggagctggacgccgccctggacaacctggacgcggaaggcgctccggcgctcgccttgcggaaggcgctccgagaacgggtcggagagctggcggagatgttcgacgggaacttcgccgtcaagcagtatcggaaggaggcgagatcatgaacgggttagacctctttagatccccaaagacggcggcggacgagatcgccgacatcgtctcggcacaatgtccgcccgttgtccctgagaactgcgacgccttctcatgccgggagtgctggcttgcgtggctgactacaggcgaaccgccaaaagaaaaggggccgtccgacaagcagacagccccgggcagagactccgctccatactacccgcccacagaagcaatcagaaaagcagcagaaagacttaaggacggaaacatggagtacacggctatagctcttattcgggctcatgatggcgaagaacttccacagccttaaacgcatacgcccgagcgatgatcgaagctgcatagtatgtttcacggcataccgctataattgcttccttttgagcgtcgctaaggttggctccggcgtgttcatcggagtcgaggatggttttgcgaaggcgctccccgagaatagaccagtcggcgtcacgacaggcatctacctcgtcatgaactcgctccacagcgttgagaacatcgtcacacatttagatcacctcctccccgggccggaagccctacttcgattataccagcgccggggaggggcacacaaggaggaaacagcagcatgaaagcagaactcaaacgagccgccgacctcgtcgccttccagcggcgggaggccctggcgcggaagcggctctcgggcgatccccggaaccccttccggccccgctacgggcggagctgaccttcacggcggcggcgcaggaggcggagaccctgggctatattctcaaattacttgagaaggaagcggcccgggagtgtgcgcggcgggtcatccccacgctggacgcgatccttgactttgtcatcgggttcgggcttctggccctggcgatgctgggcgtcgccgccgcgtgtgtggcagcgggagcgccggacagcatcacccggacggcggcgcttttgggcgtgggtttcatcacagccctctcgctgcaccgcctggggcggaagtaattctaagaacgactacacaggaaggaggacagcgatgaaaagcaacggcaaactttgccccctggggaagctcgtcgtcaaggcgcttgccgaccaggagaagacaaagtcgcagctcgccgccgagatcgggacgtcgccgcagtatctaagctacattctctacggcgtccgctcgggcgagaagtacctcccggcgctcatcgcggccctcaagctcgacccccggaaggtcgagaaggcaacggcagcatgacagcaggaagggagggacaggagtgccggacgtattcatcaccatgaaggaggcggcggagttcgagggcgtgaagtatgggacattcgcccaacgcatcgcccgcaaccccaagcagtacaagaccaagacgcagccccaggagggcggaggcaaggagcaagttttgattgcggtctcctcgctctccccaaaaggccggaaggcgtggcgggcggcgcagaaagtggacgggagggatgtcgtcatagagaagcgagcagagtccgcgccctggtatgtgggcgtcgacctcaaccactacaccgagcagcataagaaggagttctacgaagccgtcgagctggcggcacgggttcaagacttcatagagtacgacggcccggaaaaccgcacggcctacgcggaacgctacgcgctggggctgggcgtgagcccgcaaaccctctaccgctacatgagcaacgtcctcaaggcgaacgcctgggcgctcaagctggagaaggaggacgggcagaaccgggactacttccgggcgctggccttgtgccggaagccgaaggagaaggcaaccttcccaagcctcacggacgagcaaaaggcgctcattgaaaacatctggttcgaccaccgcttcgccgccaacctggggacgattgagatgctctatgagaagtttgaggaagtcgccgagggtcggggctgggagagctaccccagcatcaagacggtcgcccggtacatcaagcacctcatggacagccggggcgcagagtcggcccgctacctcgcggccaacggttcccgggagtggaagaacaagaagatgctcaagggcaagcgggacgcgacgagcctcaaggtcatggagtacgtggtcggcgacgagcacaccttcgacttttgggttcagtgggtcgccccgaacgggaaagtcaaggccgtccgtccgaagctcgtcgcatggatggacatgcggagccgggcgatcgtgggcgacgtggcttgtgtagacgccaacaaccagaccctcaaggagagccttgtgaagatgctctactcccacccgggcggcgtcccccacatcctgcacgtggacaacggcaaggactacacggcgaagaccatgacgggccagagccggaagaagcggaacatcgagttcgagttcgacgcggagacggtgggtttctaccagagtatcggcatcgaggaggtggggcggtcactcccctatcagccgtgggacaagccgatcgagcggttcttctcgaccgtgtgctccaagttctcaaaatggtttgagagctacacgggcaccctcacaggctccaagacctacgccaagcggcagaaggacgtcgacgggatgctcgagcgcggggagctgctcacgatggaggagttcttcgaggcgtggacggagtggaaggaaacgaagtaccacacccgggagcaccggggcctcaaggacgcgggcgagaagtgggtcacgccgatctccctctttgagaacggggaacgctacgagaaggcagcaccgcccgggagtatgcggcgatgctgctcatgaaggcggacaccgccctcgtgcggaaccaggggatcaccaagttcgggacactctacacggactacgagctttgtcactatgtcggcaaacacgtcggcatcaagtgggacatcgacgacgtcacgaagctctacgtcttcgacgaggagggccggaagatatgcgaggccgtctccgccgagctcctggccttcgggccccactgttcacaggcggcgcttgagcgccacctccgcgaccagaagcggcaggagaaggaaatgtgcgagatcctggaagacatgcggaggccctacgagctccgcgtccaggagggcggacgcccctcgagcgcggtcggcatgatcgacctcaccatcaaggcggagcggagcccgaaggtcatcgccctcccgaacgacaaggaataccgggcggaagcggcggcaagccggaaggccgggaagaagacatccggggacgagttcctcaccaacaaggcagacgacgccctcgcccgcttgagggctatgaacgaataggaggtacaacatggaagtcacagcagcagcggcccaggccgcaacctataccaacagcaagagtctcgcggagcagatcaacgactacctcgcggcgacgaagaccagcatcgcgaccctggcaagcgagatcccgggctattcccgcccgacgatctcccgctacctctcgggcaagtacgagggggacatcgcagccattgagaaactgctcgcggactggctggccgggcgcaccggggaggacgtggccctcccggagccgggccggaagaccgggacgaagcccgccttctttgagagccgggacgccctcaaggtgctgggcgtgtgtcagagctgtcaagagtacatcgggctcggcatcgtggtcgcccgcagcggctacggcaagacctactccctccggcagtacgccaagctcccccgggtcgcctatatcgagtgtgacgacaccatgagcagccgggatcttgtggaggcgatcgaacgggccctcggcatccccagcggctacgggacgatctggcgcagggtcaacggcatccgggactatttcaacacgaacaagggctacctcctcatcatcgacgaggcggacaagctcgtctcgaagtacacccaaaagaagatggagatcctccgggcgatcttcgaccagtcggacgtggggctcgtcatcgccggggagccgaagctcgaggcgcagatcaagacttacctcgtccgcatggcgaagcgggtcgacttctacgtcagcctcaaggggcttgacccctcggaggtggagggctacctcgcgggcttcgaggtcgcgccggacgcgatggtcgagctcaaggcccgggcctgcaacatgcagacgggatgcttccgcctcctcgaccgcaccctctccaatgtgtcccgcatccttgaggagaggggcgagagggtcgtcacagtcaagatcattgagcaagcctcgagcctcatgatgctttgacgcggaggaggccgggacaatgaacatgagaaagcagcggctcatggggctcgctatgctggcgatcaccgccctcatcctggttatggcccgaggcgggaggacgccggaggacagcgacgcgaccgccgccttcctcaccgggcccctgggcttgtatatgctcctctcgaagacctacatcctatacgacggcgaggagcaggaggcgggcgggcagaaggaaagcgtcggggaggcagctccccgggcacataacaaaactacaagaaaggaagttgtcaacacatggcaagaaagagagtggtcgagccctcgggcgtcaagacctgggaggacgcaaacgacgccctccgtcagattgcggaagcgcagctcgccctcgcggacattgagggtgagatgaacaagcagatcctcgggcgaagaaggccgcagaggagcagagcaagccgtacaaggacagggtcgccaagctcgagcgcgagctcaaggattttgtcaccgagcaccgggcagacatggggaagacgaagacccgggccctcaccttcggcgaggtagggttccggctctcgacctccgtgtcgctccccgggcgaaggagaagatcgaggagatcatccgccgcctcaagacccggcagatgatggactgcatcgtcgtcaaggaggacgtctcgaaggaggccctcaagaagtacggcgaggacaccgtcaacgcggtcggcgctacctggaagcagcaagacgtcttcggctatgagctgaacttctcgaagctggaacaggtcaaggccgggcaataagagggccgagaaacgaggtgtaaatcatggcagcagcaacaacacgcagcgggcggaagctcccctccatccgcaccctatgggcgatcgccaagtcgccggagctggggctcacggacgaagacctccacggggtcgtgtaccgggagacgggcaaggggagcatgaagcagctcacccagggcgagatcaccgccgtcgcccgcgtcctgcaaaacatgaaggacagcgcggcccgggggagccggagcaagcgcacggatgagggcggcaaccccacgaccgaacggcagcgccggaagatctacgcgctgaccgaggccctcggctggaacagcgacaagcgccggatcgaggggttcgtgaagcggatgacgggcatcgaccgcctcgaatggctggacgcgggccagtgtgagaaggtcatcgaggggctcaaggcaatcctcgcccgggagcagcggaaggagggcgcggatggacgtcgggacaagtaaagggcttgagagcttcctcgccttcctccgggagaccacggaacggcacaggatggcggaggccgaccgcgccgaggcggaggccgcgacgcaagacctcctccacgcgcttgagctgggagacgacaaggccccgggccgggcgcggctggggctcaagatccgggaagtgcggcggcagcgccggacggcgaaggacatcgcggagcagacccggcccgtggtggattgggtagagcagaaccgcaccgtcatcaagggccttgagcggcttttaggcgatgtccgcaagcaggagcgccggagcgaggggcgcagctatgcgccccgtacccacatattagaggacatacggcgcgacggagagaaggagggcagcatgaacaactttgacgagcctgtcaagaaggcggagaccgacgcggagatcctggacgcgctgcaaggggtcaagctggcacaggacgagatccggcgcggggcgtgtggcgggatggggctcgcctttttccgagcctactatgagaagctcccggaggaagtcgcccaccgcctcacggagatcgacgccgaagccgtggggcacatcacccgggcgacgggtctcaacctgtccggctcgcttctggatcggttcggggagaagctggcaagcgacgccgccttcgcccaggtcatccgggcggcgaacgtgtaccggggcggctgggctacgctcccctcgggccggacggctggccggagcaaggggaggccacaccatgaagggcccgttccgctgctccgattgcgagcacatgggactcatggggcgggcccgcctcaccagcggcacgtcctggggaggccctcgcggtgaatgttggtgcaaacacccggaagcggaggcgagtttcgccgcctccgggaaccgctcggccccttgcttcatcgcctttactgcaccagggggaagcacccccgcgatcaaaacgtcgccgaggtggtgcccgttgaaacgcccaggggccaccaggagccccggcaagggcccctcgacgggttgagggggaagttatgccaacgaagaagaagcgcctcacacggcgcgagaaggccgagagagcagcgatgaagaaggagctccaagcgagaggagtcctcccgcccgacaagccccggctcgaccggaagaagttcgcccgggagacctgggcggagttcgaggcgctctttaaggcgaagcccatccgggcggagctggcgctcatcaaggcggccggcttcatggtggggccggagatgcacagggtcacgcccgaggaggtcggcgtcctcaagctgctcaagctggcggtcgagtacgacgcttttctcgacaaacttgaggcggagggccgcgagacgtacaccacgggggagctcgtcgacgaagtcgttctccccatcatcaaactataggaggttatcacaacatgaacgagaacatcaacaccagaccggcccaggagccggagatcaacgaggtcgacgggagcccatcttccacgccgacgaggaggagggcgacgacgatgagtaacgtgaggatctgtctggatgccgggcacgtcggcagccgatacaatcagagcccggtcgtgaagacctactacgagagcgcgatggtgtggaagctgcacctcaagctcaaggcccagctcgaggcccggggctttgaggtcatgacgacccgtgtgaacatagacacaaacctcggcgtctatgaacgcgggacggcctcgaaggggtgcgacgtcttcctctccctgcactccaacgcttgcgggacggagagcgtcgactatcccgtcgtctaccgggcctacgacaacaagaacaacgtcgacgccctggctctcaagatcgcgaagaaggtcggggagctcatggggacggcccaggccggacgcacggccacccggaagaacagctccgggggcgaatactacggcgtcctccgtggggcccgtgcggtggggacgccctactacatgctcatcgagcacagcttccacacgaacacgaaggcgacgaagtggctctcggaggacgccaacctggacaagctggccgtcgccgaagccgacatcctggcggagttcttcgggatggagagttccaccaccaccgagaagacggcgatcatgggcaaggcccaggccaccgcgtcacagatggcggcgttctgcttgagcaagaacgcctcgccgcagctcccgagctgcaccgtggaggagctggcccgcatgttcatcgaggagggcgaggccgagggcgtccggggcgacgtggccttcgcgcagagcctccacgaaacgggctattttaagttcggcgggatcgtccttccgtctcaaaataactatgccgggatcggggccctcaacggcaacgccacgggacaggcggcgagcttccccgacccgcgcacgggcgtccgggcgcagatccagcacctcaaggcatacgcatccaccgaggccctcgtgaacgcttgcgtcgatccccgcttctccctggtcgcccgtggcgtggccccctatgtggaatggctgggcgcggcggacaacccgcaggggcgcggctgggcggttcccggcgcgggctacgggcgaacatcgtgaagctgctcggccagatcctcgccttccaagacccggggacggctacccggaggggacacccgactggcaaaaggcgggctttgaggccctggtagagcgcggcatcatcaactccccggacgtgtggaaggcgaagttcgaccaaccgatcaaggtcggggaaatcctggcgatcatcggcaggatgtaacaggaagggagggcgcaggacatggataaactcgccgagggtttgacgctggaaatgcttcccgaagggctctaccgcatgatcgccgaggcaatcgggacggataacttctataagctcgccgaggtcgtcgggggcacgacggtttacatcccgaagcccgagagcgtcacccggcccgtccgcgacgcccgcatcaaagaggagttcaacggctacaatcacccggagctcgcccggaagtacggcgtcacagagcgatgggttcgccgtatttgcggcccagggcagacggaggggcagctcgacatcttcgactatctcaacgacccggggcaggaggacgacgagcccctctcatgagcggcaactcttagaactgcttcgtatataagtttccgggaacgggatttaagataagagtacaagctatagcttgtactcttattttttgtccaaaggaggcagacacacatgaacatggaactcatccaaagcgcagcgagcgacgctcttgtcaacgtcgttctcgcggtcatcgccctggccggggcctacgcggtgtactacatccgcctgggcgcggccaagctcaaggagcagacggcgcagatcaaggacgaggcgggccggaaggtgctcgaggacgcccttgacgacgtcgtcaaccttgcgacggtctcggtgggggcgatggagcagaccacggcgaaggcgctccgggacgcggtcaagagcggcaaggcaagccgggaggagctgctcgccctggggaaacaggtctttgacgaggtgaaggcggcgatcagcccccaggcgcagaaggtcatcaccgacaacctgggcagcttcgacaagtacctcaccgccgtcatcgaggacgccgtcctcaaggtcaagcaggaagacccctatctcacactctccggggagctgcttgagggcgtcgcgctggaagacaaggccggagccgccgcgcagtaaggaggggccgacatggacggagcgacaatcgcgatgttcgtcttccagacggtcatcacggcgatcatcggggtcgccgcgtggggagtgaagaacgcgatcggcgagatgaaggcggcggtctcggagctcaaggcagcggacaagaagaacgccgaggagatcgccgccgtgcggacggagctcggcgacctcaaggccgacctccccctcatctacacgacccgggaggacttcatccgggtctcgaacaacatcgaccagaagctcgacaagctcctatacaggggcgcagcaaaggagggataaaagcgtatggcatactttgacgacatgacggagcaggagatccggcagaacaaggcgatccggggctacatcgtccgggccctggcaaaaggcaatcagaactcgctgcttgtgcggcagatcacgaacgccctcctcgccgacaacctcatcaccgtcccggacatctcgaagcagctctcctatttggagggcggcggctacatcgagttcacagacaagcgggccacggcctacaacgcctaccgccgcgacgccgtcatccagctcacgaaggcgggcgtcgaccttgtggaaggcacgagggacgacccgggcgtcgatgtctaagaaagagcgccggaggacgcggatcagctcgacgatcgacaagctcccggacgacatcaagacggagctcgacgtccggctcgcggacacggccaacacctacgaggagctctccgcgtggctcaagacggagggctacgaaatcagcaagagcgcgatcgggcgctacgcgatccgcagcacccaggcggcgcagcgggtcgccgagaccctacagcgcacccaggcgatcgcccaggcggtagaggcgcaccccgacctcgactacacgaaagcggcgtcgatggttctcatggacggcctcatgcagcgcgtgagcacggcggagggcgacttccaggagatgccgcttgacaaggcggggcggctcatcgcaagcctcgcccggaacgccacctatgagaagcgcgtccggcaggacatgaagaagaaggccgagcttgccttcgaccagcttgaggcggagctcatggcggcgatcaagcagcacccggagctcaccggggagctgcacgacgtcctctcaagggcgagggagaaggtgctcgatgatggcgaagattaacctcaaggactacctggaacggctcgaggagccggaagaccgggaggcggtcgcaagccgggagtaccagcgggaactatttgagcagtatgtccagaaggggacgaacttccccgagctccgggcgcagctcctcgaggagtaccgggccggggcggagctcacgggcccccaggggctacgccggaagctcggggcggttgacctgggctacttcgggcgggcctacctcccccactactttgtgaggccgtcgcccccgtttcacgaggagctcgaccgcatcttccgcgagggcgtcatgaaggggctgaaccccgccaccgacgcgaaggaaatcagccgggcggacggatgccggagggcggtcgaggccccgcgtggacacgccaagagcacgaacttcaccttcaaggactccatccactcggcggtgtacgcctacaagcactacgagatcatcctctcggacagctcggaacaggccgagggcttcctctccgacatcaaaacggagctcgaggagaacgcggcgctccgggaggacttcggggagcttgtgggccgcgtctggaaggcgtcggtcatcctcctctcgaacggggtcaagatcgaggcgctgggcgcgggcaagaagatccgcggacggcggcacaaacaatggaggcccgacctcatcttgtgcgacgacctcgagaacgacgagaacgtcaacaccccggagcagcggaagaagctccgggactggttctacaaggcggtctcgaaggcgggcgacacctacacggacatcgtctacatcgggacgctgctccactacgacgccctcctcgccaatgtcgccaagaaccccgagtatgaggccgtccgctacaagggcgtcatctccttcgcgacaaacacggccttgtgggacgcctgggagcgcatcttcaccgaccttgagaaccccaggcacaaggaggacgccgaggacttcttcaaggcgaacgaggccgcgatgctggaaggaaccgccgtcttgtgggaggagaagctcccctactacgccctcatggttatgagggtatcggagggcgaggcgtccttcagcagcgagatccagaacgagcccatcgacccggagaactgcgcgtttgccgaggagtggattgactactacgacgacgggcagcttcccccggacttctccgaggcgcggttcctgttcgtcgcggcgaacgacccctccctcggcaagaaccgcaagagcgacacctcggcgatcatcgccgtggcgaaggacacctcgacggggtatatgtacgtcgtgatcgccgacatcgccaagcgcaagccggacaaaatcatcgaggacgcgatcgaggcgtcccgccgtttgaagcgggagtacaagaagcccctctacaagttcggcgtcgagacggttcagtttcaatactacttcgccgagatcatgcggcagaagtccgccgagatcggcgagtaccttcccatcgaggagatcaacagcgtccagaacaaggacgcccgcatccagtccttgcagcccttcgtgaagaacggctacctcaagttctccaagcggcacaaggccctcctcgaccagatgctcaagtacccaatggggaagaacgacgacgggccggacgcgctgcaaatggccgtctccctggccctctcggtcaaggtggggcagcacacggattataaatcagttttgggccgcgctatcaagttcaggcgcggggcctactaaggaggtgaggcattattagtacagttattcacgagaacacaatcattcacggagatagcctcaccgtgctccggcagatgccggacgagagtgtggacgcaattatcaccgatcctccctatggcatcaactaccacaccaaagggacaggggcttccatcaaaaatgataaatcgccgttcatctggttcctatatgatgctttccgcgtactcaagtcgggagactcggggcgtggttcgctaatctgctttactcgctgggatgtggagcaaaccttcatcgacgccatgaagctggcggggttccaggttaagagtgaggttatatgggataaggtcatgcacggcatgggggattgcaaagcacagtttgcgccaactcacgagaacgtcgtctttgcagtcaaagggaagtttagcttcccgggcaaacgtccgagggatgttgtcacatatcacaaacttgcaagcggggaaatgatacatccaacggagaagccggtcggcttattgacaagccttgtcaatgcggtcactaaacccggcgacctcatccttgacccgtttgccggaagtggctctactcttgtcgccgcaaagaagtcggggcggcggttcatcggcgtggagcttgacgacgagtattatgaaaaagcacggcggcgcattgaggaggtggtcgagtgagcagcaagggaaagcggtggagccttagaggtttgttccagcgccgccccgagacgcgggaggtcgcagccgcccaggtaacagacaagtacagcgagtacccctcggacgggctcacccccgtccggctggcggagatcttcaaggaggcggacgccggggacgtgctccggcaagccgagctctttgaggagatggaggagaaagacccgcacctcttttcccagctccaaacgaggaagaacgcggtcacgggcctcgactatgagatcatcccctttgacagcgacgaccccagggacaaggagatcgccgagtttgtggaagcgcagctcggcggcatcgagggctttgaggacatcatgctcgacctcctggacgcgatcgggaagggcttcgcggtctcggaaatcatgtggagctacgacgaggggcacgttgtcgtcggcgacatccgttcccgtcatcaaaagcggttcttttgggacagcgtcgacgactccttcaaggtgagaacccaggaggccccggagggcatcgagctcccgaagaacaagttcatcgtacacaaatacaaggcccgcagcggccacccctcccgggctggcgttttgcgcgtggtcgcctggatgtacctctttaagaactacaccctcaaggattgggtcgcgttttgcgaggtcttcgggatgccgctccgcctggggaagtatcagccgggcgcaagcgaggacgacaagcgggcgctcatgcaagccctcgtcgcaatcggggcggacgcggcaggcatcttcccggacggcacggcgatcgagttcgtgaacaccgagaagaccagctcgaccgacctctatgaacggctggcccgctattgcgacgaacaggtctcgaaggcgatcctcgggcagactttgacctcggactcgggcggcggcagctacgcgcaaagcaagacgcacaacgacgtccgccacgacctcaccgtcgcggactgcaaggcaatcgcggccaccctccggcgcgacctcatccgccccctggtgctctacaacttcggggaggacaagcgcatcccgtacctccgcttcgacgcggaggagtcggaggatctcacgcagacggcgaccgtcatcgggacgctcatccgggaggcggggctcaaggttccgacaagctacatctacaagaagttctccatcccgaagcccgagggcgacgaggaggtcgccaccccgcccgggcagacggcgcaggggcggggttcggccccttctccttcaaggcgcagcccggcgagccgattgcgctcaaggccggggacggagcggggcacgggacgcaagagcgcgtcgaccgtctggcggcagcggccacccggaaaagcgccggggccttcaagaaagcgttcggcccggttctcaaaaagattgagaacgcggagagccttgaggagctccgggacatgatggaggacgagaaggccgtcgccgagctgttcggcgagatggatgtctcggaggtggaggagctgcttcaaaaggtcatgctctacgccaacctcgaagggagggcggcggaagatggacgacattgaggccgtattcaaccgaaaggacatgaccttcgaggaggccgttcagtatttcaaggagcgcgtcccggtcacggcgtcggttttctacagtatcgcggagaagtaccgggggctcgccttcacagtgggcggctacacgaaggcgcagatcctcaagcggttctatgaggagatcctcgcggcgctggaacaggggaaccccctctcggagttccggcgcaatatgaacgagttcctcgaggtcgagggctatgaggggctcgacccgctgcaagccgacctcatcttccgcaccaacattcaaacggcctacaatgtgggccactatgagcagatgacagacccgggcgtcatgaagctccgcccctactggcagtacgacgccgtcaacgacgcccacacccgcccgagtcacctcgcgatggacgggcgggtcttcccggcagacagcgaggtgtggaatacatggttcccgccgaacgggttccgatgccgctgcacggtcaagacgctctcaaaaaggcaggtcgaggcccgggggctcaaggtggagcagacagcgccggagggcctcatgcccgacccgcacttctcgaccaacccggcaaaggtacgcttcgagcccgacctcaaggactaccccgcgccgcttgtgaaggcgtaccaaaaccgagaaaaagagaacccgggcaaataaggcccacagaggccccaggaagggccgaggggccggggagtgtaattcccggggcgcggcaggttcaccccgttataacgcggaataacggcgtttccgggggcttcaagcaccaagcaaaggagacaggcagaaaatgagcgattttctcaccctaaagggggcgaagtggatgtcggaggagcgccggaggtcatctccgttttgcccttcggccatgtcgtgagccagaagggagagttcgacgtcgacgaggaaagcctcgccgcgatgaaggcgcagatcgccgagcgcggcgtcgaccttgtcgtcgactacgagcaccagaccctcacaggagaccgggcccccgccgccggatgggtcaaggagctgttcgccgaggacgggcacatcaaggcccgggtcgagtggacgctcccggcgaagcagtaccttgagaacaaggaataccgctacctctccccggtcatcaccgtccgcaagacggacaacaaggcgacgggcctccactccctcgccctcaccaacaccccagcgatcgcgggcatgaccccgattgtaaattcatccacatttgaaggaggcaaaaccaacatgaacgaactcatcaagaagctcgcggcggcgctcggcctgggcgaagacgcgggcgaggagcagatcctcgaggcgctctccgcttgcatcgaggagaacaaggccctcaaggaagccgccgagggcaagaagcccggggacggcaagcagccgcccgaggaggacaccgtcgtcgcgaacaaggccgtctgtgagctcctggggctcaaggccggggctcccgccgccgaggtcgccgccgtcatcatgtccctcaagggcggcatcgacgggcgcgtcaaggcccttgaggagcagctcgccgaccgggatgccgaggaagccgttgagctggcgctcaagagcggcaagatcaccccggcacagaagggatgggctaaggactacgccctcaagagcccggaggggttcaagtcgttccttgagaaagcgccccaggtcgtccctatgagcgaggtcgcgggcggcgaggccctggcactcaagggcaaaaagcccgacgaggcgacgatgctcatttgcaagcagctcggcgtgagcgccgaggatctggaaaagtacggcataaaggaggagtaacatcatggcagcattgaccaatgtgagagacacgtccgagctcggcgggaagtacatcgccctccctgtcaagggcgcgaccaccatctatcaaggggcgatcgtggcggttgacgccaacggctacgcgatccccggcaagaaggccgcaagcctcaaggcggcgggccgggccgaggagaccgtcgagaacaagggcggggacggcgacgccgtcatccgcgtcagccggggaaccttcgtttttgagaactccaccagcggcaagatcaccgccgccgacgtgctgagcctctgctatatggaggacgaccagaccgtcaccaagaccgggacgggcgcgtccgtggcgggccttgtcatccgcgtggacgacgaaggcgtcgccgtggagatgggcttcggcctcaccgcccccgcagccgccgaaaagtaaaacagaaggaggacaaagaacatgattgtaaaccagcagactttgagggggatttacgtcggcttcaacaccttgttcaacaaggcgtttgagggcgtgaccccgctctacaccgagatcgccaccgtcaccccctcgaccacggactccgagacctacgcatggctcggcgacatcccggggatgagagaatggatcggcgaccgcgagatccagaacatcaccgcgagcgactacaccatcaagaacaaggacttcgagctgacaatcggcattgaccgcaacgcgatcgaggatgacaagatcggcctctataacccgtctgtccagatgctcggccagtccgcagcagcccaccccgacgatctcatcttcaagctgctcgcggagggcttctccgaaaagtgctacgacgggcagccctttttctccgacgcccacaaggtcggcaagaaggccgtctccaacaagaccacggccaagctctcgatggagtcctacatcgccgcccgcgccgctatgatgagcctcaccaactcgaagggccgggcgctgaacctcatcccgaatgtgctcgccgtcccgcccgccctggaagcgaccgcccgggacatcctggtcgccgactacatcaacggcaccaagaacaccatgcagggcaccgcgaagcccctcgtcatcccgcagctcgccgggcatgactccaagtggttcttgctttgcacctcccggcccatcaagcccctcatctggcagcagcgcaagaagccgaagttcgtctccaagacccaggagaccgacgacaacgtcttcatgaagaagaccttcctctatggcgtcgactcccgagggaacgcgggcttcgggttctggcagatggcatacgccggagacggcaccgccgaagcctaagcccggccaagcagacgaagggagggaacggcgtgagctacagcacgaaagaggaagtccgggagatgctcaaggacgacgccctcaacgcgatcatcggggacaccttcatcgaagaccccgccgagcgtgaggagctcgtcgcgccgattattgaaggcgcgatcgccgacgccgacgcggagatcgacggctacctcgccaagaggtacgccgtcccgctctccccggccccgaaggttatcaacaagttttcaaaggacatcgcggtctataacctgttttcccggatcggcatcgacgagagcaccgaccaaaagacctacctcaaccgctacaacgcggcgatcaagttctttgagcttgtggccgacgggaaggtctccatcggcacggaagccgacgacccggcaagcgcagccgcgaccgggttctcggcgaagtcaaacacccggcttttcacccggggcagcatgagggggatgtagggcgtgtatagcatccgactgcaaggagacaccgccgccctcctccgaaaaatgcggcgttattcggagcttgacaggaagggcctcaacaccgccctcgccgaaggcgtccgggagtctaccctcgaacggttcaagcaaggccgggggccggacggcaagcggtggaagacctccatccgggcggcagagaccgggggcaagaccctcatcgactcctcccagctccgcaactccatcaagacgacggcggacgcctccgggtttgcggtcggcacaaatgtcaagcacgcggcaacccaccaattcggcgacaagggccgcaccatccgggcaaagcgggcgaagaacctccgcttccaggtgggcggacaatggatcagcaagaagaaggtcaaggtcaacatccccgcccggcccttcctcggcctctcggacgaggatatgcaggagatcaaggccacgaccgaggagttcatcgggagggatgactaatgctctacaaggaaagcaaggaatacctcctcgacaagctcaaggcggcgggcctcaagtccaagccgtacacgacgcaaaaggccctcgaaaagagtcaagagagtcacatcggcgcggtgctttttgagtcggagaccctcctccgaaacggctccaaaacacgatatagagaccaagagggagcgcagaaaaagaggaggaaggtcttcgaccgggccctcgcctttaccgtgataatcggcgactataccgacgaggcggtcgagagcatgttcggggcgttcctctcaagcctcgaccggggcatctacgtcaacggggactttgttccgatcgaggtcgagggggcggactgggtcgacaaggacgactctattctaaaggcacaggtcgccgtgcaaatcaagataaggtttgacggcggggtttacagggacacagacttcgcgaaggtctccgacgtcgcggttgagtccatcaccaaaaacgagggaaaggagtttatagatggcgaataaagcaacatcggcccccgcagctacacaggcagcggggccgcaggaaccgaaagctccggggctctttgagatcggggagctccgcaagaagcacaaggtcgggcgggccgtcttcgcgggcgtatgcagcgcccagggctggaagcccggcagggccgtcaccgaggaggagttcctcgcagcggtcaaaaattttgagaacgccccatgaacggggcacacaccacaaaggaaagcgaggcgagacgataatgctccgagatgtcaagcacactgtcacggacggcctcctcgggtttgccaccgcgacgggggacggaaagagcctcaagatcggcgtctctccgatcgtttcggacacgccgatcatcatcaccggggatatggacgcggcgaaaatcaaggcccgcctcggcctgtcccctctggcggatgccgtcatgagctccgtgcagttcggcgcgtcgcggatctactgtctcccggtctccgctaccacggcgggcaagctgggaagcgtttctaaggacggcgacggagggggctccgtcaccgtggacggctctccgacgaacgccttctcggtggtcgtcaagatcacggcgcaaggcgggctcaactccgccgcctttatctgctccattgacggcgggaacagctacaccgacgagatcaccgtccccgtcaccggggaatatgaaatcgaggggacgggcctcaagctcaagtttacggaggcgacggagtcggaacagaagccgagctctttcctcgtgaacgatgtctatagcttcacgaccaccgcccccaccatgacgaacggcgacgtcctggcggcgttcaccaagctccagaagttcgccgaggagtatgagttcatccacgtcgtcggcgagagcgacctccctctctggcaggccgtgagcgaggcgcaaattgagctccgggacacctaccacaagcccgtgtttgtggtcttcgaggcggcgttccccaggcgggggacgagggtgagctcgacttgcgcggcagcggggatctcaccgattgggccctcgagatggaggccaagcgcaagaaggtcaaaaactacgacatccaggtcgtcaccgcctgggggcggctcgtcatgctggacggcacgacgcagatcgtcaacctcgcgggtcttgtgtgcggcctctacgcaaaggcggcggtgcaggagtccatcggcaaaaccagggcggaggccgggttcggcatcccgaagacgaagctcctcgagctgctccccgccgggatggacaactccatcatcgaacttttggacgtggcgggctacctcacgttccgggagtacgacgggctcgacgacttcttcgtctaccacacaaagatgatgagcccggacgggagtgacttccgctatgccgaggatgtccgggtcaagaacaaaatcatccgggagacccggaaggaagggctccttctgctcaacgacgacatcgacctcgaggacgtccagggcgagcttgagacccgggcgaagttcatgttcgtccccttgcagcgcatgatcgacgcgaaggagatcagctccgccgagatcaccgtacccgaggggcaggaggagaccatcctcgaggacgagacaatgcgggtcaagatccgctatgtgtcccggggctacatccgggaggtcgaggtagacctcggcagggcgcagcccagcgactaagggaaggaggttaaagagctatgtccctaaaagtaaacggccagacctacggatggggcgacgtggacgtcaagatccccggccttgtgctcgtggtgcaggaaatcagctacgacgacgagcaggagatggaagaaagctacggcaagggctaccgccccgagggtatggcaagggcaattataaggcgtccggcaagatgtccatgctccgggacgactacgacgacgtcctcgcctactgcaaggcgaagggcatcccgttctatggcattgagtggccctccgtggtcgtctcctacgccaacgaaggggagcgcacccggatcgacgagctcaagaaggtcatccccaccaagcgcagccacaaggccgcgcagggcgacaagtccctcacggtggacattgacctcatgatcgtcggcggcatcgtggaggacggcgtcgagcccacgaaataaaggcgttatctcaagataatcgagaacaggaggacaaaacactatggaagacatgaagaaggaagtcgcgggcaagagccgcgccgaggaaatgaaggagaaatacggcaaggtctaccgcgtcggcgcgacgatcgaggtggacgacgagaccgagaagacggtcgagttctacttcaagcgcccctccacggcgagctatgacagatacgtcaagactaccgcccagggcgcgacgaaggccctcaagaccttcctctttgacaacgtggtcgcggaaagcgaagcggatctcgaggccgaccttgaggagttcccggccctggcgctctccatcggcgagaagctgctcgggatgctgggcctctctaagcagacaaatttgaagatgctctaaaagagcagctctcggaggtgaagggaaactttgtggagaccgggcttctggaaatccaccgtttcctcccgccggctcttttagagggcttcaacattgaggagatcggcctcgacgagttcctccgctacgttgcgaaggcgcggtacatccaggagctcgaggagggcatcgtcgcccgggcgatctccgaggttttctcggagtagccgggcggcgtcggtcgccttgattaagagcacaaggtcgcctccatacgttaggaggtgaaaggcaaagcatgagtttagagtccgtgttccggttgtcgctcattatgaacctgatcgacaacctaaccgggccgatggctggcgtcacgtccagcgtcgacggaaccgtctccaagctgcaaaaggtcaattcaactctcggcagcgtggcaaagacgggggccgtcatgcaggaggtgggctcgcagatcacgggggcggtgctgtccccggtcgaggccaccttcgagacaagacgggcgatcggcgagctggcctccctgggcgtgaaagacctcggggcggtcgaagacgccgctcgagcgttcagcgaccaatgggccggaaccacgaaggccgacttcatcgcggcggcctacgacatcaaaagcggcatcgcgacgctctcggacgagggcgtcgcggagttcacaagcctcgcggccctgaccgcgaaggcgacgaagtccacggcgggcgagatgacctcgctatttgccacgggctacggcatttataagggctactatgacgacatgagcgatctcgagttcggcgagatgttctcggcggggattgctaagtcggtgcagcagttcaagacgacgggctccgagatggcctcgagcattgagagcctgggcgcgtcggccacgaacgcgaacgtcccccttgaggagcagctcaccatcctcggcatgttgcaggggacaatgagcggcagcgaggcgggcacgaaatacgccgccttcatccagtccgcagcgaagggcggcgaggagctgggcctctcgttcctggacgcaaacaaccagctcaagagcctccccgagatcctcgaccagctccggggcaagtacggcgacaccatcgacgcgatggagaagcaggagctcgcctccgccttcggcacggacgaggcggtcgacctcattgacctcctctacaacaagaccgaggacttgcaggggaacatcctcaccatgtacgacgccctcggctccggcacaggggtcgccacggagatggcgaacgcaatcaacgagaccgagccggagcggtttgagcggctcacgcagcgcatccagaacgtcaaggagtccatcgggaacagcttgctccccacaatcaacgatctcatgtcgacgggcgagcaggtgctcacgaaggtcggctcctgggtcgaggagaaccaggagctcgtccgggtcatcatgcttgtcgtcctggcgatcggcggcttcctcaccatagcggggacggtcatcgccgttgtctccggcgtgggcctcattatcacgaagacgatctccgggttcaagctcctaaaggccgggttcctattggcaaaggggcgctcacgccgcttatagcgagcgtgtggagcttcacagcggcgcttttagcgaaccccgtgacgtggatcgtcatcggcattgtggccctcatcgcggccctggtgctgctctataacaagtgtgagtggttccgcaacggggtcaacgcaatcatcgactttttcaaggagaagctcggcgcggccctcgaggtcgtgacgtccatcttctccgggatcggcaacgtcatcggctccgtcatgggagcggcgaagacgaccgtctcccaaaaccttgacaacatgcgctcggcctatgagtcgcacggcggcggcatccgtggcgtggcagcggcggcgatcgagggcgtcaagggcatttatacggcggggttctcgttcctggacaacctcaccgggggcaaactcacggaaatcaagaacaagttcgtcacctctgtctcgaacatcgcctcgggcgtcgccgagcggttcacagccgtcaagacggcgttcacgaacggcatcaacgccgcgaagaacatcgtctcaaatgccgtgaattggttctttgagtccggcaagcgggtcatctcaacatttgcaaacggcatcaagtcggcgtttacgggcgcggtggacgcggtcaagggcggacttcaaaagatccgcaacctactcccgttctcggacgccaaagaggggccgctctcgaccctgaccctctcgggtcagcgcacgatgacgacctacgcccacggcctcgagctggcgcaggacgcgcccgcacaggcgatggaaaaggggctctccggggcgaaggccacgcttgaacgcgagcccgcgaagaaggtgagcctcacggacaccaacggcgggaaggaagacaagcagggcggcggctccggcgagggcagctccggcaagcaggtcatcatccaaaagctgctcatccccgtcgacctcaagaagatcaaagacctcgagcagcttctcgcgctgctcaaggaggccgaggactacgccgaggccaacggcagcgaagacccggagggcgacccggatgccgctccgacaccagcgtaaaggaagggaggaacgaccgtgatttacaccgaagaccaactcgtcaaagtgaacggggtcgtcctccctggccttgtgaaaagcatcgaggtcaaggagtcggccaagattgacgagcaggaagtagagggcagcgccaccaaacccaaacaggcgacgggctacgaggacgcaaaggtcaacattgaactcatcctcgacgacacgcccacggccacgaagtaccagcggcttgagactgtccgggccctttttcggacgcccggccagtccgtcccgcagccgatccccatcgtcagcgaggacacggcaaagcacggcatcgacaaggtgctattcaagggcatcacccacaagagcgaggtcaaaaaggatcagctcaccgtctcccttgagttttgggaatatgtcccgcagacaatccagacgacgagcagctcctcggggagttcctcgggcggctcctctggcgggaagacggtgaaccagcaaacgaccctctcctcggactatcagaagtatttacaggcaaaccgggggaagtcgcccgccgtggacgacgcaagcgcggcggaggccctggacaaagtggcgcagatgccatactaaagaaggaggcgcaacgtggagacactggaattattttacccgcagatcgcggcgcgggctggcccctatatattcgaccggggcgtcgagattgaggtctactccgcgaaaacgtcctattttgattgggcgaagatccgcttcaccgagcaatttcaaccgaagctcacccttgcccggaaagacccggcagcgatagagctcggatataacgacgtctttgaggaagtcttctccggctatgtcgccaagccctacaacggcggcgggttcatggacgagatcacgctcaaggacgagatgctgctcctcgaggagacgcagatcaacaacacgttcctcgacaccaccccgcaggagatgatctcctacttcctcgcgcaagcggggctctcaaagatgaagctctccgccacgggctacccggagcgcaagcggctccccatccggcagatgaacgtcatcgaggcgatcaacgccgttcatgcagcatggaacatcaagcagccgtttttcttctctggcggcgtgttctattggggagagaagccggaacaggaaaagacctacatcttcgagtatggggtcaacattatcgccctcacccgcatcggggcgcgtgggagcttgagaccgtgtcggccccgtttgtccggcactcccacaaaatcagcgtaaaacatcccaaagtgagcggggagttcgaggtcgcgaaggtggtctcggccaccaacgacgacggcttcatccgcacgaagatttatttctaagaaccaggaaggggggcgcggaagtgcttgagcaaatgataaaggcggtagcgaagaagctcatcgcgcaggagtacccgcacgtcaaactccccgccgtggtctacgccaccgtcagcgaggcggcgcagctcggggagacattcgagctcgaggagcctgtcatccacaacgacgagaccgggagcagctacaagggccacatcacggcacactggaacgagtacaccctcaccgtcgtcgaccgcttcggcaacgtggacgagaccttcccggccctcccgggcgtccgctctaaggcgcaatacaaggccggggccgtcgtcgccgtggcgctggcctacggggacagcccggcgatcatcggggaggtgcagctatgacgggcctaaacgacaccgacatccgcctcacggacgcctgggagctcaccagggcagcggacggcgacgcccctctctgctccggcctggattgcctataccagaatatcatcctcgaggccctcacacagcccggcgatctcttttatgacgccgccttcggctggggcctgtatgacttcatccagtccgaggacggcgacctcgtccggcttgagatcgcgcagcgggcgcggctgggcctccaaaggcgggaggtcatcgtgcccgagagcatcgaggtcgaggtcagtttttccgacgatgtcttccgcctctggtgctccttccgatttacggacgaggagagcccccgggagctcaacgtcgttgtcagcgcggttgatgtggaggtgataacagtatgattgacaaggatatactcgacgaggtgctcccggttcccgagcttgagacgctcaaggagcagaccatcggcgagctgaaagaggaaggtttcgcgatcacgaacttccactcgggcggcgtcttctacacgctgctcctcatcgtcctccgcgtcaaggtcgagttcacggagctgctccgggacgtgctgaacaacatgttcctcactcacgcctcgggcgtgtgggtcgacctcaaggcggcggactacggaaagaagcgcaagaaggcccaaaagacccagggcctcgtcacactgtccagaacaaacgaccagggcgaggccgtcaagatcccgaagggccatgtcttcaaaacggagaaggacgtcaacggcgaggagctccgcttctttgtgcttgaggcggcggtgctgcaaaaaggggctcggtcggtggacgtcctggtcgaagcggagaaggagggctcccggtacaatgtgccggaggcacagatcacccggagcctcacgttcctcaatgggatcgacggcatctcaaacggcgaggactggatcgtccgggaaggaagtgacaccgaggacgacgagagcctccgcacccggggcctccgttcctggtcggagctggcggcgcggtcgattgaggacaccttcatcaacaccgccgaggccgtcccgggcgtcctgttcgcgcaagcggattgcgaccaccccggggcaagggacggttgacgtcattgtcacaggcacagcgggagaggccacggaaggactcctcaaggaagtccgggaagccgttgacaagatcgccgggccatacgataatgttattgtaaagtcatctgtcaccgcaccacaagatattgaggttacagtcacgaccgccgacgtcgcagcggaggaggaagtcaagaaccgggtcaacgcaattctcaccgatctgctcgccgtccgcaagggccggaggttcaacgagctccggcgctcggacatcaacttcgcgatccgcagcaactacagcgccgccacaaacaccgaaatcaccaaacccgccgaggacgtggttcttgacaaggacaaggtcatcaccctcggcacggtcaaggtcacggtgaggagggagtgagcggatgaagcggttcggcacgttcggcgagtatatgttcgacctcctttttgccccgctcaagcgcggcaagcgggcggccaatcagttttacatcttcttcaaggtcgtcgggcgtatcttcgacggcatgaaaaaggacgtcttccgggttcggagtgaagcgaacgtcgcaagcgcgagcccggtcatgctccccgtccacggacaggatcgcgacatgccgagacttgaaggcgaggacgtggagagctatcggacgcggctttccatgaagggggtcatctccgagtggagcggcacgaagacgggcatcctctacgccctggccgcgctcggatatgaggagagcacgattgagcccttctcctaccaagaccccgagcggtgggcggagttcatcgtcttcctcaagggctccaagcaaagcggcatcaacaatctcaccgtcatcgacgcggaggttcggaaggtcaaggagggcagctcaaagcccgcctacggcgcggaggccgggaacggcatcgagatccgctcccaggtcttcacgggcttctcgagatacccccgttgcggagagattgtttgcggagtctggccccgtgtggttagcatcggccaccttttggcgagcgacatccaggcgggcagcacccggggctccggcgaggtcgagttcccgaaggtgggaacaatcgcggcctcggaaaaattctatcagccgtgcgcctttgtcatgtacgagggcctcgcctcctgcattgaggcgggctcggaggcagactccggcgcgaaaatataccccatgtgctctccggcgcttcgctgctccgggacaacatacatgacggaaggaggggaagcagatgccgaaaacactcacagcggtcggcattgagaagatcgggcggcgctttgccgactcggtcgaccatgcagcctatacgctgaacggcgcaccgaagacggtcaagccgttccgcaagctcatcgaggcggacaccgtgaagatttacgtctactttgacgacacggtttccgggaacgtggcaaatgtgcagctcgtcgacacggacggggacatcatcgcccagaccgagcgcacattcgagaagccgccgagcaagggtctctatgtggccttcaaatataacattattgaaaaagaaacggaggtagaaattgtaaatggaagcgtataaaaagatcggatggctcgaccacgtcgaagatgtcgcgacgggcgaggtcatccaggaagggacgcccgtgagtcagacgaacatgaaccacatggacgacggcatcttccaaaaccgagaggccgtcatactccatgaggcgcagatcgccgacgcacagaaggagatcaaagtgctgaaagacgccacgctcaacaacatgacgaacaacgtctttctcatcaattttgactctgtcaacgcggtcgcgatcacgtccggcatctatgactccgtggcgcggaaactctatgtataacctcgcttgtctttccgggaatggcggctatatggtcgcctgtacccgtaaagaggcaagctgcatactcgggaactttttcggcgagctttgcccgatatgcgaaatatgccgggaactcctggatgacgagctcgccctcaagaccgcgagcggtctcactctcgaaggggaggccgtccttgtcattgagggacacagctccatcacgggaaaacccgcgaaggtaaagctcaccgactacggcttcgagttcttcggggacatcaccgagatcgcccgcattagaaatgcgaggtgctgctacattggaaccgtccatactgcaaaagaaggctgagatcttcctcgagagagatgtctaccccttgctcaagaacttcccccaggccgaaaagtttagtttgtcgcaggaaatcaagcaatcgtgttttaggctcatccgggcggcggtcatggcgaacaacctcaccgtcgtcaaaaagcggcttgaatggctggatgaggcggacgccgagaagacgctcctcctcgtgctgttcggggtcgcccggacacagaagtacatcacggagaagaagatccacgagctgcaaaccaaactcaacgaaatggggcgcattattggaggcttgcaaaagcacttcatcaacaaccgataaaaagtaaaccgcacctacttagggttatctctgtatggcgtcgaaccgtgcgaaccgtgggtacaactcggcccgcaactggaattggaacaactcgtccaatcggaacgcgaacctcggtttccgccccgccttgtaggttttacgtcattcgcggctacggcttcgagtgcgtgtccttgttatacttcaagggagaggtaatccttcgccttgtctaagacggcgtaaaaacagtgacgaccccgagcccgcccttttgtatggggaggcaagggcaagtctacaatgtgggtataaacccgcgtcataggtgccaagccgttcccaaaggaaaggatgccacaatgacgaaattccccttatttattaaaaccgcgcagaatataaaatgcccgcagatcccgccgatcatgccgcttgtgccctatgaggaggcggtcggctacgagcggatcaagggcggctacaagcaagccctaagagggcgaagaaagtacacccgggaggccgtcaagtacgacctgttccgggagaagaacaacgtcgacctctggcgggagctcaagagctcgaagtacacgccgggcccgtatcacttcaacgtcatcacggagccgaagcggagagacctctccattccacagctccgggacaaggtggtgcagctcgtcatccacgaggaactacaaagcatgttccggcccgtgttcatcaacggctcgtttgcttgccagtacgggagaggcccgatccgcgccgccttcaaggtgcagcacgacatgagggtcgcccggatgaaatggggcgacaacgcggcgatcatcaagatcgacgcccgaaagttcttttattccatcgaccgcgctctgctcaagaaaatccttgcgaagcggttcaagaagctcaagaagaaacgcccggagacctatgaggatctcctccgcttctatcggcttctttgcaaagtgatcgacagctcgccggagggcgagacgggcatccctctcgggaatgtcagctcccaagacttcgcgaacatctacctcaacgagctcgatcagttttgcgtccgctttctcggcgcgaagctctacacccggtacatggacgacatcgtcatcgttgcgccggacaaggagaccgcccgggaatggctggcgaaaatcaaggtattcctccacgagaggctacaccttgacaccaacaaaaagacaaaggttttctatatgcggcagggcgtgaacgcctacggcttcaaaatcaaggccacccacatgatgctccgcaccgagtccaaacggagggagaagcggcgcgtcaaggcgatggttcggaagatgaaggaaggcaagatcacgcgctcggcggtcgtccaggcggtcaactcgtggctcgggtttgctcgctgggcgtgtgcctacaatctcgcgaagaagatattcgcgccctaccgcttcatcaaaacggaaggagcgatcccctatggcgcaatatctcggaaccgtcaagctcggcggcttctacaacaacggcgcgatcttgaagcgccctacaaaaccgtggcgtcctgacggtgatgtaggcggaaactacggcgtcggcgacatcccgcagatgtccggcagcatggcgaactataccttcggaaataccccagcgcggacgcgaacaagctccaatgggtcaaaatcaaggacggagacaagacgctgcttatttgcgaccgcgtcattctggtttcggtttcctgggacgacctcaactcacagggctacatcacaggcaagactgtcaccatcgacggcgcaaaatacaagtgccgcgtcctcacaggcggcagcaaccgaaggaatggcgactcctatgcgggcggaacacccactaataacgagtgggacaggttcatcacccgcgaggaggtcatctcgggcctcccggccccggtctcctccgacctggacaacaaccttaactcgaccgaccaaaacagcgcgcataacaagttttggaactggtatggcgtttattcctggtgccaggaagtttttgcggataatgcgtcgtaccgtgcgacccgtgggttcaactcggcccgccgctggaattggtactactcgtcctatcggaacgcgttcctcggtttccgccccgtccttgaagtcctgaacactgaccctctgatctctgacagtgacagaaatctcggagacaagaacacaaacttcacgatcgagtacacggtcgacgacgccgactccggcgacgtcttgacggcgacggagtcgcttgatgggcgaacgacgaagtcgttcgccccgacgcgaaaagcgaaaaacacgatctccatcaacatcaaggaagtctccctcgggcagcacacggtcaaggtcgtcgtcacggacggccagggcggaacggctacccggacatggacattcacccgagtcaactccgccccggtcatctccggcgcagacaccaacctcggggacaagaacatcggcttcacgtacacctacaccgtcgacgacgcggacggggacgccgtcacagtcgtcgagaagctcaacgacgagaccctccgcaccctcaacaacgccccgaagggcgagcagctctccatctccatcacttcggaaaagctctacgcgctggggctcaatacggtcaacaatctcgtcattgaggcatcggatgggcagggcggcacatcctaccgccgcctcaccttcaagcgcaccaactcggccccgagcatctccggcgaggacaaagacctcgggcagcagacgggcagctttgcggagacctacaccgtcaccgacgtcgagggcgacaacgtggtcgtcacggagtttgtggacgaccaggagatccgcagctatcaagcgacgctcggcgaggaggagacgattgagctctcccgggagaagtggctcaccctcaccaacggggcccatcagctccgcgtggaggccgtggacggcaacttcgcgacgagtgtgagagtctggaatttctccaagaaggagacggtcatcaagttccaattcgcaaagcccgaggagacggacgcccgggcgacgaagatcctcatcacccccacatggaagattgagggctcggtcgcaaaggtcgaagcgtgtaacaatgcgtttgacgcggccccgacctgggaggacatcacggcgcaggtcgcgatcaaccgggttttcaacttcacgaacgagaccaagaccgccgagaagtggggcgtcgacgttcgtttcaccatcacgaagaatgaggggtatgagggagaggtttcgatctccgggtttggaggtgcatacgaatgatgcagtatttaacaccgaagaagtccatcaaggcaatctcggacgctcaaaagcggagtgagtccgcccaggccgtcgccgagctcatgtttgtcaaagcggcccaggcccagcagctcgacgacgcctccatcgcaaaatatcccgagttctttgtcacctgggatgagaattggaggggcaaggcgggcgacatcgtccaggacgaggggaagctctaccgctccatccatgacgtcaccgacgccgggcagaaccgaaaaccctcggagacgccctccatgtggacacagatcggcaaccctctcgaggagttccccgactgggtgcagcccctcggggcgcatgacgcatacagcaagggcgcgaaggtttcccacaacggcgagaagtggacgtccgacgtcgacgggaacgtatgggagcccggcgtctatggctggacgaagtacaccgagcccgtgaaggcccaggaagggccccaggagcccgcagaaggcccggacgaggagccggaagggtaaacccccacaagagggcaaaaggcaaagggaggggcggcaaaagccgctcctcccggagcctaaaaaagcccgccctcttgcgtgggccgctccccttgttggggggcggttgacgcaagtgagcgagcctcggaaatgcttctaagaatgggcggatttttctcaactatcctgtctctatttctcaaaaatcttgtcgcgctacagaaggagaagggatccagtgtgtctatgacaataaaaactgggtaatgtgtattaaaaactggaaaccaaataatgatattgaaaatatccgttatctggaagtgcatcatgccactgatgagcagtttgtgctattaaagggaaaagcggtgctgctggcggcagtgaaagcagatggcgcctgccggattgatgttataccgatggagccttataaggtttacaatattccacagggaatctggttcaatacaattactcagaaagatacgaaactcgtctatgtccaggacgcagccaccaccgcagaaaacagtgaatactgtgatatgacgcaagaggaattgaacgaggtgaaagagaaagcctccgcctgcctcgattaatttttgccaaagactataatgatatataatattatagaatgataagtaatgatattgagggaggtgaaagatatggtaattgacatgcacgtacatccggctcttttttccgatatctgcggagataaggacagactgaagctgagatgtgatgaaatgggataccatctgatggggccttcgcctctggatgtgcttgataaacaaaatgcatatgcgggaattgataaaatggttctcttacccctggaccattctgtccgctgcggcgaagtggtgataaccaacgaagaaatccggactcttgtggataaacgtccggacatgctgattggttttgccagtgttgacccgcaccgcagtgacgcagtggaggttttggagcgtgcttttaccgggctgcagttaacgggtctgaaactgaacccggcaaagcagaggttttatccggatgacaggatgatgtggccgatttatgaaaaatgtctggagcacaataaaccggttgtttttcacgcaggactttcgtgggaaccggatacgctgtgcaaatattcccatccgttaagatttgaggaagtggccctggaatttccgcagcttcggctctgtcttgcccatatgggatggccctgggtgcaggagacggccatgctgatgattaaatatccgaatctttatgcggatacggcgatgatgtatatggacagtgcggagcagttttttgataaggtctttaaacatgatatgggagagtactggctcgatcacaacttccaggatcaggttatgttcggatctaatgctccccggtttcggcctgtacgcatcaaacgcgggctggacagtctgaaaatgcgggaggatacaaggcggaagctttacggtgaaaatgcaatgagatttcttggattggagggctgacagatgaaagtggaactgacagaaaaaacggtctgcgccggccgggaagtggagttgattaaaatcacggaggatgttaaggagacggtaaagagcagcagggtaaaggatggcgtcgtatttatcatcagcgcccatacgacggccggaataacgatgaatgagggactgccctgtgtggaaaaagatttgatagataagctggacaaaatggtgccatgtgacgatatttatgcccacgcccattttctcccgtcttacggcgccacagggggaaattccccggggcatatcaaatccatgctggcgggcagccactgtgtacttcccgtgaaggacggaaatatggttctgggacatgcacaggatatctattttgccgaatttgacggtatcaagaacagaaaatattacattcaggttatgggtgaataaagcgatggaagaccaaaacagggagatgggaaaatgagggttgcggcagtaggagataactgtgtggatgtttactatacactgaaccgtttctatccgaccggaaacgcggtggattttgcgattaacctgaaaaagctgggacaggacgtctcgctggtttccattcagggcgatgatgtattcggtgtgtcagttgagaatgtcctgaaaaagtacggggttgatttgactcatttttataaaggcggccggcagacggctgccgcgcagatgaacattataaacggagaccggattcatgagaaatttgacaaaaatgtgctggcggattttacgctggaccgggagaggcttgattttgtaaaacaatttgatctggtttattcggaaaagtggtcacggatagggcgttacataaaagacataaagaacggtaataacattatgattcatgatttttcaaagaggctggccgatcctgggaatgaggagatactgccatatctggattacgcgtttttctcttacgagaagcttgacgaaacgattaaagactttttaaagtcaactcagaaaaagacgggacggatcgtaatcgccatgctcggcggggacgggagcctggcttatgacgggagccggtattaccgggagcctgctaaacaggtggaaattgtcaatacggtgggagccggagatgcctatgtggcaggatttacaaagggcctgtgcgaggggttgggccttccggaatgtatgcaccgtggtaaagagacagcgacgaaaataatccggatgtttgatccgtattaacaaaagaaaagcgggagtgaaaggagaagagagtatggaatttaatgcatattcaatgttagtagacttcatgtgggcaggtattttcctgtttatagcaaaaatattgagggaaaaaatcagggtgctgcagagcctgtttgtgccggtgagcctgctggccggattcatcggcctggctcttggacagaatggattcggggtgatgcagttttcaagccagttcggttcatatgccggcctgctgattattgcagtattcgtatccatcggactgcgcggcttcaatttcagcagcggcggctggaagacgaattttgaccgcatcggaagctattactgctacagaaatatcggatgggcattccagtatgcggtgccgattatattttcaatggtagtgctgagaatatttgctccggaactgaatacggctttcggcatgctgattcccgcaggattccagggaggacacggaactgcggcagcgctcggccagactctcggcaatctgggctgggaagatgccaccgaccttgccatgacatctgcaacagtagggattctcaccggtatattcggcggaattgcactaatcaaaattggtaccactaaaaattatacaaaatatgtaaaagacttcagccagcttccggacgatatgagaaccggactaatcgacgaaggccacaggccggttctgggagatgagactgtttctccgatggccattgacccgctggcgtggcacctgctgctgatattaatcccgaccggagccggttatctgctgaccaatgcaattcaggatgccacgggattgggcgttccgagtttctccgtcggcttcctggcagcgattttattccatttcctgttaaaaggaattaaagcggataaatacgttgacaaccgtatcatttcccgtatgggcagctgtgcgacagactttctggtatttttcggagtggcttcgattaaaattccggttgttatccagtatgcggtaccgttcggcctcttaatgctttttggaatcctctgggttgtattccactttacggtgattggtccccgtctgctgaagcaggaatggtttgagaggggaatctacgtatacggatattccacaggtgttactgcaatcggaatggccctcctgcgcattgtggatccggagaataagagctgtacattggatgacgctgcaatcgtgaccccgattgagtctgttatcgaaattttcgcactggccgccgtcccggtagcctgtgtacaggggaactggatagccgccgttgtcccgattctgatttacctcgcggcgctgcttatcgtcccggtagtgtttaaatggtggcacaagcatcctcacgcagtatgggacgagacaaaataatcagaattcattacagcaagttccctttatgaaaaggatgctgccgctccttgacgccgagtgagccgtggcatcctttttgtctgttgacgaaaagggcccggattcggaataaaataagaaagaaggtaaaaaaatgtggacaagagacttatttaaggtggagaaaccagttatcgccctgctgcatctcagggctatgccgggtgacccgctgtttggcggggaggatacgatggaatccgtgatacaaaaggcaagagaagaactgacgactctgcaggacggaggcgtggatgggattctgattgccaatgagttcagccttccctacgaaaagcaggtttcctatgtgacggttgccgctatggggtgtattgtaggcgaacttaaaaaggagataagggttccgttcggtgtcaatatcgtatcaaacccgatagcaaccattgatctggcggctgcgacaggcgctgattttgtcagaagcacctttaccggtgcatacataggggaaaatgggattaccgataccaatattccggcgacactcagaagaaaaaaagagctgggactgaaaaacctcaaactgctgtttaaggtaaaccctgagtcagatacctacctggcggagcggagccttgagaaaatcacaaaatccataattttccactgctttcccgacgcgctttgtgtgtccggcagcagcgccggctcagagacagattccggcctgatggagcgcgtgaaaaaggtatccggcgggacaccggtattctgtaacaccggctgcacaaaggaaaacatcgtggaaaaacttgagcagtgtgatggagcctgcattggaacagcgttcaaaaaggatggaaaattcagtaattatgtggagaaagagcgggtaaaggaaattatggatatcgtgaaggaatacaggaaaaatattggcgctgccgcaccttcctcccggtcataacgcggaaaggactattatgggaaatgaaatatatttcatggggattgatattggcacctataccggcaagggcgtgattaccgacagccatgggaaggtggcggccagggctgaaatcgcccacggaatggaaaatccggccccgggattctatgagcatgatgcggaggcagtttggtggcatgatttctgctttctgtcaaattccctgataaaaaaagccggaatcagtccggagctgataagagccgtgggagccagcgcccttggagcggactgcctgcccgtggacaaagactgccgtccgctgcgcaaggcaatattatatgggattgatgccagatgtatggaggagatcagggaacttaccgattattacggggaggaaagaacaaaggaattattcggccgtcccatgtgttccggagatgtggctgcaaaaatttactggataaagaaacatgaaccggatgtatataaacagacttataaatttctcaccggttcctcttatctggcggcgaagctgaccggaaattatgtggtggatcgttttctgggcatggcttccttccggccgttttaccggccggacgggagcatcatagaggagctgtgccagcctgtctgccggcctgaacagcttgcaaaagggcagatcgtgacggaaccggcgggaacagtgacccacagggcagcggaagaaacggggcttaaagagggaacgcccgtgattacgggaagcggggactcggcagcggaggcagtcagcacaggcgttctgtctccaggggatctgatggttcagtttggttcctccctcttcttttactgctgtaccgacaggcttatattggatgaccgcgtcagaggcaataattttctggtgccggggacctgcagtgtagcagccggcacaaataatggaggcaccctgcaaaactggtaccgggatcagttattcccggaatgtgtggaaaaagaaaaattaaccggtgaaaatgccttcagtctcatgatggaagggctggataaaatagagccgggatgcggcggacttatcacactgccctattttgcgggcgagaggacgccgatcaacgatccctcagccagggggatgatatttgggctgaatctggggcatacgaaacagcatctgtatcgttccgcactggaaggcatcggattttccgtctcgcagcatatagacatattcagggaaaacggtcttaatccggcgcggattctggcagccggaggaggtacaaagaaccgcctgtggatgcagatgattgccgatataacgggaatcccggttgcgatagcaaaggaaacgtcaggggcgtcctacggcgacgccctgatggcagccgtcggagcaggccattaccgtgattttgagtcgctgaaagaggtaatcagaatcgaaacactgctggagcccgatttggcaattactgccttataccggaaaatccgcccgcttttcgaccgcctgtaccgggagaaccgggaaagcatgcatgccctgtaatgaattgagatttagttaagcaggtgaggacgccgccggtacggccagcggacgggggggtgtatatgagtctttcgtcccgggggttggcatcgctggctggagaaggagatactgtggttttgttttcgcagggcggagccggagagaatgatatccggctggactgcttcttcgagggatagctctaagacagaggaaggcaaagcccccggggctacggacaaattcgctccgaactccgaatgagttcgaagctcaagttgtcccggattttgcccttgtagggctaaaatccgcccggcgcgctttgtctccctctgcctaagagctatcatctctcgggcgaacgtccttccggatatcattctctccggctccgccggaagatgtcggcagtatctccttctcccggaaggctttcgtcgggacgaaagactccgccaagtgtatcggccccgtccactggcctgcggccgctgaatgtctcatgcgttaagtgcgaagggcggaccttgtcgcggccactcagtgctaccgtttacgggagttacgatatgccttcaatgcgcctttatgaaagaattgcgctagatttgatatctgcctgcggtaacacgtagtggccgcgacaaggccctttccatttaaggttagagacaatcagcgcccggaacggaccatgtccggtgtgcgaaaacctccgcctgagtcttccgttcccggcgaaaacctgccccgggaagtaggcggaatcaattgcggaggggacatgggagtccgccggtgcttagcgaggtctctcacgagcttagcatcccgatgcgcactccaaagagtgcaaacggtccccgcagcaattcattccggccggatttccccctcacgacaccctccaaccggggacggaagactcagccagccccctcaccacaccggacatggtccgttccggacgcgtcctcctaacctcagttaaatctactgataaatgctaaattttcattgaaaaccacatagaaaaagcatatacttaatatatcagtacgaggaatgtaaatattaagtcaggaggaaaaaggatatgaaaagattaatgaccgcactactcgcagcagttatgactgtaacgatggcaggtacggccctggcagccgaagacccggcagcgctgctggaacgtgtgacacagaaagcgaatgaactggattcaatggactgtgacttgggggttcacgctgtaatggtgatgcaggatccggagatggatttagatttaagcctgaatctggatatgatgatgaacatgaagatggatcagattaagtcggggaatctccgctacaaagcggatatggcgatggaattcctgggccagaccgaatatgctaccgttttctataaagacggctattattatatggattctaacggggagaagattaaatatccgatggatttgaattctatgatagcatcggtagagcagacaacagcggcagccgatttggctccctctcttatgaagagcctttccgtcagagaagaaggcgaaaacagggttttaagctatgtggctgatccggcaaagatgaatgcctatgttcaggatgctttaaagccgcttctgggcagcatggatgtaggaatgattatcagggaagtaaagggagagtatgttataaataaagatgattactatacgagtatgaacatgtatatggttatggatatgagttcctacggcgagacattgagaatcatcatgctgcttgagggaaatttcaataatccgggtcagccggtaaatctggagcttccttccacagacggatattcggatctgagtacatattatggcacatcacggggcagcagcggcgcaacaggccctgcagcagagatctggtaattaaattactgagaagttaaataacagatgaagagaagatatggccgggactttatgccccgaaccgtatcttctctttttaagttactgttcatagggttgcataaccggccggctttgccctataatgagaaaaagagcaggggggaatggcagtgcggcgaacagatgaaagcggaaaattccaaaaaaatctacagaaatcagtggcaaaaagaatcattctcatgattcttatcagctcgcttcttttcctggccggccaattttcggccactctggcagcaaatgagctgaacgcttctaatcacctgaagaagctggaggaggtttttcttcgctttgacaggcagaaccgtgagtttctgctgaatgaaaatacagtaaaagctgtggaagcgataattgaggggaggacgccgggcggcggatgaattcaaaaattatttcagacggtttgacgagaactgtgatgtgcgcaatcaggtaatcattacgaatacagagggagaagttctctttacttcctttggcgagaatcagctctcctcttatcttgtaaattataataatgcagtctgctataatgccagaaactgcggtgagggagatatatacagggcagtttattatgataggggaaattatgcagatgccctgtttatcaagccaatatttgtggagggggaaatcacagggtatataaccttatttttatccggaagcgggtggaacttttatttgtcggaaagcaactttgacggagtgattaccgatctcagacaaaatgtcatgtatatcagcaaaccgggtctggcagacagcagtaataaattttacggaaccaggcatgggagctggacccatggacaggcccgatactgggtcgtgtcgaaggaactgccggaattttcggcaatcatttattctctggtatattatcccggaaacgaaaccgtatatatcggtttgagcgcactgtttataatgggggctgcctggtatgggatagccagatggatggcgaaatccatggcagaaaataatgcggcatctattgaaaggctggtcagtgaaatcagaattatccgtaaaggagactatgatcatcggattcagatgaatacggacgatgagttcaccgaggtaggatatcaggtgaatcacatgctggacagtatccaggcgttgaatgacaggaatacagagcttttgaagctgaacagccggattgaaatggatcagcttacagcgcagatgaatccccattttctttataatacactcgaaataataaggaacctggtagtctttgatgcggataaggctgaggaattgatagtaaaattaacggaagtgctccgttacagcattgatacctcgaaaaaggaggttacgttagaggaagatatgcgttttatgtactgttatcttgacatccaaaattgtcgttttggaagcaggttcagctttggggtcaatttcgaaccggagtgtatgaactgcattgtaccaaaacttttgctgcagccgctcatcgaaaacagcatcaagtatggattcaggaagaagatggaacttaatataaagattagcggtcatgtggaggacaatgttctgctcatcagcgtcctggatgacggccttggaatggaggaggaaaaagccgaggaattaaggaaacagcttagagcgcacgataacagctcgccgtccatcggactcaggaacctgtcgcgccgtctctacctgagatatggcgatggaagcgggcttcagatccggaacagggagggcgcaggttttgaagtagtggctcggatagagcagaggaaaggagagtgacacatgtaccgagtggttattgcggaagatgaggacatcataagaaaaggtctcgtctattccattccctgggctgatatggggtgtacggtggtggggaggccgcaaacggcgtcgagggagtagcgctgatacagcggctggagccggatattgttgtggcagatatcaatatgccgattctggacgggctgggaatgattcggcagacatatgaacaatatgattattctgctattatattatccggatactcgaattttgaatatgcgagaactgccatacgctatggggtgacaggatatcttttaaaaccattgaaaagggaagatttggccgaggcaataagagacgcaaaggaaaaatgcatgcagaggcgttcctggatgagccataagaaggaaaaggaagagtggaaaaatatacagctgattcccaaagaaggaaccagcagtgaggatgatgcggtggtgaaagagatgcttgcgtttatcagacagcattatcgtgagaaattggtattgcaggatgttgttgatgccttaaactatagtgaaacttttttgaacaagaagtttaaaaagcagatgggaaccacatttattgaatacctgaatcgttttcggattcagaaagcattagaattgctcagagaaggcagaacggcagtccaggatgtgtcctggcagtgcgggattggcgattacaaatattttaatatggtattcaagaagtatattgggtgcagcccgaaggaatatgtgggaaaaatcaaacagcaggagaaatgaaacggtttgtaatatagaaacagcggctgatccatgcagcaggaagatgataattcctgctgcattttattgatgacggtgacctgtgcggggagcgtgcaggttaacgaggacgaaacgttaacttgtgtttggtatttttcccttttgagcggtattttaggtagaattgattggactaattgtataagattattaatataaaagaagatattatatacaaaatacctaaaaatgggcggtggtgtacgtgagtgtaactattacgattcaaaatgcagtaaaaaggtacggtaatgtgacggtcataccggatttatcagtaacaattcgaaatggggaattatttacccttttgggaccgtccggatgcggcaagacaactctgctgcggatgatagccggttttaacacgatagagggagggagctttaagtttaacaaccggttaatcaacgatatggagccgggaaaacgcggcataggaatggtatttcagaattatgcgatatttcctaatatgacggtgcgaaagaatgttgagtttgggttaaagtataaggacatgccgaaagaacagatgaggaaacaggcacagaagttcctggaactggttcatgtagatcagtatgcagacagaatgccggaacggctgtccggagggcagcagcagagagtggcgctggccagagcgcttgtgattcagccggatgtacttttaatggatgagccgctgtcgaatctggatgcaaagcttcgcgtcgaaatgaggaccgtgattaagaatatccagaaagaggttggcattacaacggtttatgtgacacatgatcaggaggaggcaatggcaatctccgacagaattgcagttatgaaggacggggtgatccgccactgcggcgagccaaaaaacatatatcaaagaccggccgatctgtttgtggcaacttttattggaaaatcaaatcttctgaatgctaagctgatgcaaaaaggaggggaggcagtgcttgagtttccgaatggataccggatttgtatggactcagtacaggattcggaaatcagggaacgggatgtgaccttatccgtcagaccggaagaattgtttgtgcacaagtgtacagagggggagaggaaggaaggtatcagcgctaagatcatggacagcgtatttcttggttccaacactcattatttcgttgagcttgagacaggagaaacagcggaaatcattcaggaatcggagattgatgagattattccaccggggagacgggttttactcaccttgaacagccgcaaagcaaatatttttgaccccgagacgacgaaaagcctgatgaaggggattaaaaacagtacggacatccccgggacgaggcaggacgggaggtgagcggatgagccattcgaaagtgcgctgggatttctggaatattatttccggggattaatggtcctgtttcttatattcctggtttatcctattggcaggcttctgaaggaatctgtatatacagacgggaaattcaccatggaagcatttcggatgtttttcagtaagtcctattactacgaatccatattccacagtgtgaaaatcgcgttctgtgttatggcggcgagcctgcttctgggtatcccctttgcttatttctattcctttttcaggctcggcggccggaagctcttattcgtcctctgcctgctttgtacgatgtcggcgccatttatcggagcttatgcatggatacttttaatgggcaactccgggctgattaccggaatattaaaatcatttgggattaacggtgtatccatctacgggttcggaggaattgtgtttgtgcagaccctgaagctctttccgctggttgtaatctatatgaacggagcattcagggatatcgacaactctctgctggaggcggccgagagcatgggctgcaaaggtgtggatcggtttaagagggtgattatggccctgacgatgccgacaattctggcggcagcgctgcttgtatttatgcgttcctttgccgatttcggaactcccgtgctgatcggacgggggtacagcaccttccctgtactgatatacaatcagtatttgggtgagaacgggacaaactaccactttgcggctgcaattagcgtcattgcggtactggtgaccgctgtaatattcattatccagaagacagcatccaaccggttcaaattcacgattaatgctctccatccggtggagccgaagaaggccaccggcctcggtaacttcctgatgcatgcatactgctatctcctggttgggatttcgcttctgccgcagatatatatcgttaatatgtcatttagaaactataaaaacagcattttgaaaccgggctattcccttatcaattatcagaaagcgctggagaaaatgctgatgcgatcggtcggaaatacattaattgtcagtgcgctgactctcgcagtgattatcgtaattgccgttttaattgcgtatctggtagtgagaagaaacaacctgttcaacaatgcaattgatacaatatccatgatgccgtatatcatgcccggagccgtaatcggtattgccctggtggtggcattttccagaaaaccgtttacgcttacaggaaccctcttcataatggtgatagcgctggccatacggcgtatgccttttaccagccgttcggcaacggcagccatgatgaaaatccccgttaatattgaggaggcggcattgagcctggggcctcaaaaccggcggcatttattaaaataacggttccgatgatgtcgagcgggattatctcgggagcagttttaagctttgtatccataattactgaaatgtcatcgggggtgattctgtataataacagaacgattacactgacaatcagcacctactcggcaatcaccagcggaatctatggtgtggcggctgtatttgcgaccataacaatgctcctgaccattatctgtctggtagtctatctgcgttttaccaagctggaagacgtaaaaatgtagctgtccggcaggaaacaaatttaaaagagcaaaataaaacatatagaatgaaagggaggatatttatgaagaaaaaaagactgatggcggcgggtttgtctgcagcaatggttttatccatgactgcctgtggaggaaaagaagccccggccgagacaaaaaaagaagagacgaagacagaagccgcgaaggaacaggccgagcaggacagcggagaaaggccctattatgtgaggccggcatcagaggtaaccgggaaaatcacggtatatacaacgatggaggaaactcagcagcaggtacttaatgatatatggaaaaaatactaccctgactgtgaacttgagattcaggccgactcagtcggaaccctggcaaccaggataaggagcgatgaatcgtgcgacgctgatgtggtaatcggagggatgtttgccgctgacggcgacacctatcacgacatacttcagccgtatacgggcgcatgtgataaagaacagctttatcacgatgatgcaggctactataatttttatgatgtacaggtgatgtgtctcgtggttaacccggcattgagagatgaacttggcattgaaattaacggatatgaagatttactgaaccctgccctgaaggggaagattattcttgccgcaccggattccacgtcgtcgggctggcgtcagcttcagacaatcctggctgtgatgggagataaattcgatgatgaaaaagggtgggattatattaagaaactgattccggccagcttttccactacatcgtccaaagatgtctacaatctggtcagcaacggcgagtatgtggtcggtctttcatatgaatcaagtgtagtggcattaatcaatgacggcgcaccgatcgaatgtgtctatatggaagaaggaaatacagctatggcaggcggcgcggcgattgtcaagaatgccccgaaccttccggctgctcaggccatgattgatcttcttacttcggcagaattccaggacgcccgggcagaggtatcggcaggacgcggttctaacggaaactgtaatttaagcggccttcctgcagaagatacgcttgggatgaaggagcttgattttgactatctgaaagaacacaaagacgaaatcatgaatcactggaatgagctgtatgcagagcttaattaaatggagatttaactgaggttgggaggacgcgtccggaacggaccatgtccggtgtcgtgaggggcgggctgagtcttccgcccctggttgaaggttgtcgtgagggaatccggtcggaatgaattcttacggggaccgttcgcacttttcgaagcgcatagccgtgctaaattcgtgagaaacctcattaagcacggatgggcttccatatcccctgcagaattgattccgcctccttcccccggtcaggttttcgccagggacggaagactcaggcggagattcgtgcaacaccgaacatggtccgttccgggcgctgattgtctccaaccttaaatgaggaggaccctgtcgcggccactacatgtttccggcaggccgatatcaaatcttcagcaattctttaaaaaggcgcatggaaggcatatcgtatttcccgtacacggtagcactgagtggccgcgacaaggtccgcccccgcacttaacgcgtgagacaatcagcggccgcaggccagcagacggggccgattcacttggcggagtctttcgttccggcgaaaaccttccgggagaaggagatactgccgacatcttccggcggagaaggagagaatgatatccggaaggacgttcgcccgagagatgatagctcttaggcagagggagacaaagcgcgccgggcggattttagccctacaagggcaaaatccgggacaacttgagcttcgaactcattcggagttcggagcgaatttgtccgtacccccgggggctttgtcttcctctgtcttagagctatccctcgaagaagcagtccagccggatatcattctctccggctccgccctgcgaaaacaaaaccacagtatctccttctccagccagcgatgccaaaccccgggacgaaagactcatatacacatcccaccaccccgtccgctagccgttccggcggcgtcctcacctgcttaactaaatctccaatcaggtcttagcagccttcctgtctgaactgttacaaacaagcgcagcagccattaattccctgcttcatcctccaccatccggtatccaatcccgatttccgtaaatatgtactgtggctcagccgggttctgttccagctttcttctgatatgggccatgttaacgcgaaggatgctgttgtcatcatctgcatagggtccccatatattagaaataatggcgtcatatgtcataacacggccggagttcttggccaggagagagataatcttaaattcgatctgggtcagatgaatctccttttcgcccagagtaaccagatgcttttcgaaatcaatggtcaaatccctggcgtgaaacggtcttttgtaaagcggcgagtccgtattcagccggttgctgtggcggagcgcggtgcggatcctggccagcagttcggaagtcccaatcggcttggtcagataatcatcggcgccgagatccagcgctttcaccttctcctgctcttgtgtgcgggcggagataacgataatcgggatactggcccaggtgcgcacctgcttgataatctccattccgtccatatcaggaaggcctaaatcgagcagaatcaaatccgggcactgggaagtgataatcggaagcgcttcctttccggaatgcgtttccgtgattttataatcctgcgcggataaagaggtagaaataaaatcacagatgttcttttcatcttctaccagaagaatcgatgttttatgagtcaatttttgagccctcctttggcaatgtgaaataaaattcggcgccgttgttatggttggctgccttgatatcgccgccatgggcgactataattgtcttacagatggaaagaccgatgcccattccctttcttccgtcattggatgtactggtggtggaagaagaaccgtcgaagatagtgcttaacttctcagggggaattccaattccatgatcctgtacatggaacgtgatataatcatcgcctgtatccacgtaacattctaccggctccgtggtttttgaatggacaaaggcattctccatcagattaatcaatacctgttcaatcagaacggcatccattggaatcatcagcacttcatcgggtacacagacattcactctggcatccggcagcctcttcttgaggcggagtacggcttcggccagaacctcctcaactgactccagggatttatttactttagtggtttcattatttatacgtgtgacggacagcaggttttccaccatgttgaggagccagttggaatcctccagaatatgtgagaccagatcacttttttcggtctccgtgagatacttgccgttctccagataaacggtactcgaaccgataatgctggtcagaggggtccgcaaatcatgtgatatggcccggagcaggtttgctctcatcttctctttctcggcttccatcaagagcttctcacgttcggaaagaacctttgcctgttccttcatattcgtagtcagggcgcttgtggcgatggagatggaaaacatggcgatgaaggtgatgggatatccggtcagtgtaaagtccagcgcaaaataaggatatgtaaataaaaagttgacacagacaacgccaaacagcgaagcgaaaagcccgtaaaaatatccgctcgtaaacctggctgttaaaaacagcgccagaatataacacagggcgatattggcggtcggattatccatgatatgaaaaaatatataggagagacaggtagcgacggcaagtaaggcgccggtcactatccagtcgttaatcgtaccgtattgtttaaaaagcgcatgttgttttttcatgtcgccgttatcctgactgcacatataaagaaattcctcctgcctgcagctgttactgctctgttaacattatacaatcattcatgtcaaaagagcaacgatgagacgttaaaaaagtgataaaattgcaaatgtggggatttaactgaggcccggaggacgcgtccggaacggaccatgtccggtgtggtgaggagggctgtctgagtcttccgtccccgtgggaggttggtcgtggagggggaatccggccggaatgaattgctgcggggaccgtttgcactctttggcgtcctcacctgcttaagtaatgcgaacattgcttttttgccctccttgtgctacactccaattcagtagaatcttatcagatagtacagctagtactccatccggcctgtcactgtagttaccggccggatggagcactggaactgttgggcattataacccgcgggcgggaattgtggggccgggaacagtaaatgttgttttcagaaaggaataaaatgaagaaattaggaagaaatgatgcctgctggtgcggcagcggaaaaaaatataaacattgccatgaggccctcgatgaacgtcttatggcggagtcggataaaggtcacattgtaccgacacgcgatcttttgaagactccggagcagatagaaaaaatcagggagagctgcgccgtcaatatcgcggtgctcgattatgttgcggaacatatcggggcggggataacaacggaagagatagataaatgggtgtatgatgagacggtaaagcggggcgggatcccggcgcctctgggatatgaaggatttccgaagagtgtctgcacctctattaatgagcaggtctgccatggaataccatcagaggatattgtgctgaaagacggcgatattattaatgtggacgtatccactatctataaaggttatttttccgattcatcgagaatgttctgcatcggcaatgtcagtcctgagaaacgccgtctggtggaggtggtgaaagagtgcgttgaactggggcttcgcgaggtaaaaccatggggatttctcggagatatgtcacaggcggtaaacgatcatgccgttaaaaacggctactccgttgtgcgggagattgggggccacggtgtgggaatcgaattccatgaagagccgtgggtcggatatacggggacacgtgggacggatatgatgctggttcccggaatgatttttacgatcgagccgatggtgaatatgggaaccaatgagatttatgtagacgacaccgataactggagtgtttacacggccgacggcaagccttcggcacagtgggagattatggtgttggtgacggatgacgggtatgaggtcctggcgtattaggatttagatccggctttggaggggcaaaagatgaatgcgatagaaaatattgtaaagatggttaccgaacttaagaaggaactggaggaaatgcctgaaactaaagaggcaaagccggtcagccgtgaagaattcacactgcttttgagcggtatttccacatgcagaaaggcccccggcattccggtgcatatgggatatgaagagctgtaccattgtgcggacgccgatgaggaggctaaaaccagggaacatttacagaggatatacggcatccataacgaggaggcatttcagtccgcctgccacagtgagtattccgggagcagacagtatgagcagttcatgacattctggtgcggcgctccgatgtttgacataaatgaactgaatggggccggaagaaagggatttgaggaatgcatcagcctctcaagacatttttatcctatcctgaaggaaaagggatattatgcctgggatatcaatgaaaagattggactgctgagaaaagctgcggcctgtgggattgtgtcggaggaacggttttgggaactgacggatccatgggtcaggcaggcccaggtgttttatcattcctggcaggaatacgcaatcagctgtctgtgcggagccgtatattttatgagtcatcatggaactgtggatgaaagcttttataagctgaattataatctggtacgccacttgtttgaggacggaggggcgtggaggagaaacgcatggtacaggccgcaggaacgtgaatgggccgatattttcggggctaatccgggctgcatcattacaaaaagggcgatggagacggaaacgattggttacatgtaccgggatgagccggcaaaaggatttccagactgcggctggcgtttttttgtgggcgatgagccggatgagtatgtaaatcaggctgaaaataatacgatcatcagttttaacacggtctgcaatctggatccgaccatcctggcctatttctatgcggatgccgggcgcaaattcggcagaacggaggacggctgggaagaagaattttaggaaagaagaattttaggaaagaagaaggatgggtaaataaagcaggagccttaccggcgccgcagaatcagatgattcacggcgaaagtaagactcctgctttttctgaaaacggaaagggggaagtagaaaagttttcagaaatctatataaaggtaaattattgttagtcgagcccaatgaccttttgcgcgctttctatatgtcattggcctcattgatttatgtaactatcatactggaaaattgtgtctaatgtttgaccaatatataaaaatagtctaaaagagatattaaaattaaaagaggggccggttcatgattttaaaagccgccataaagtagtccggctaatccccagtctttttgccgcagcgctctggttcccaccggtttcctccaaaacagcgtgaataatatcctggttaatttcgtccagcgtgcggttcaggttaaaggactgcaccggattctgaataccggaatgaggcagaagggcagcggaggtgtgttcctgctccagggcatgggccaccgtgctttccagaatataaggcgtggtggtaactgccgtcagttcactgagaatccgtttaaactgagtataattataaggccattcataattaacaagaagctccatggccccggattccagccccagaatttctttggccaggctgatattcagagaactgagggaaaggttagccagtaccggaatttcctccctgcgctcccgcagcggcggcagatggatggtcaggcaggacagcatgttgacatagtccatgcaccgttttggaattactccgtccttaccgcatacacaggagaagagaagacggttgcggcgggccaggttcatatcgacaatcagggaaagaagctgtttgtgccgttcctccgggagggtgtccacatttttcaggtaaatcgtattattattatcattaaacggagaattgtagtggtttgtaaggaatgtccagcttttgtcattcatcatggtgaaatcgatgacgaccatgggattgtggtgcagcggactctgcgtatagacagcccctgcaaccctctcctttccggtgccggcctcaccgatgatcataatcggaaaatccgtctgagtcatctgttcgacggtggcctgtaaaccgccgatggcgccggttacattataaaaactgttgtagaacgtattttccacatcttttttgctcagatactgtacgccgtatttgctggtcgcgaaaggaaccttgcttgaagaaaaatagaaaaccacgtagttttgcccgtaaaacgggatcagacggctggtgatggaatacaggactcccccgatatttttaaaggaacggtgggtatcggccgccagtgcggcagaaacctcccgcttcagtacatcgattatgagaggctcggacccggattccagggtcgagaaaaagacttcctctttatcgctgaatacgactgtttcgtgactgtccttaagaatcacattctggagaaatttattctcttcacgtaaaagggaatggctgcggcatagtttgactgcctgatcaaaggcgtttccaatgctctcgttgccggaggtaatcagaatcgcattcagtcccagtttttttgccgtcgtattggcgatcatgtcgcatagcaccatccggtagccctttttcttgagggttaaaagaatatcctgtacctcgtccgcactgtggattgtatagatctccaccttatattgaagaagatcgcagagcagctgggcgctgcttgtgattccggggaaaccgacgatggcatagcgggaggaaaaattctcagccatcttaatggcgcgcagaatgtcgtagacggaaagcgcaatctcaattacaggaagcggggtgatggctccgattaattcagccgtgccgccccgcgatataataatatcgaagtcttcatggaaattcttccgggcgatctctgcgcctttatggagatccccgacaaatacgctcaaatcaatatcgtcgcgatcctttgcaagtttcagcataatggatttcatcccctcgtaaggcgctatgccgagaattctgatttttccctgattcatagagttcccctttcttaacataaacgtgtttcattatgaaacgattgtaacataaaacaacaaaataataaatataaaatcaaaagtgtttcaaatataaacagcaaaacgggtaaaaaaggttgagcaaaaataatattcttagtaaaataaaacaaatcaaaggaaatgaaacaataaacgacagaaagtcagaaaatacatcaataaattatgagaagctattgtttaaaaatgaaacaatgtggctttggtcgggaaaggaaacaatatggtgaaattactgatcattgcagatgatttcacgggcgcacttgatacaggagtacagtttgcggcaggtggagcagagacaagagttgttactaatacggattacgattttgacagcgtggatgagaatgtgcaggttctggttctggacgcagagacaaggcacctgagtcgggatgaagcttacagagttgttttccacattacaaaaaaagcatttgagagcgggattccatttatatacaagaaaacagattctgcactcaggggaaatatcggaagtgaactgaaagcagttcttgatgccgcttcgcggacctccctccattttcttccggcatttccaaagatgaaccggattaccaggaatggaatccactatattgacggcgttccggttcatgagagtgtatttggcaaagacccgtttgagccggttgccgattcatatatcccggagatactgaaggggatgtgccggtgacggtggtccgcaatatgaaggactggaagagggcgccgggaatcatggtttacgatgcctcaagcgatcaggagcttatggagtttggaaagttcctgatgaaaaaaggggaactgaccgttatggcaggctgcgccggttttgccggagttttaccatctttgctgggactggaaggcgaaaggccgagacaggtagctctgggcgaaaaattccttgtagcctgcgggagtgtcaatccgataacggtcaggcaacttgattatgcacaacgtcagggatttacaagaatcaggatggctccgcaccagaagttcgacaccggatactaccggacgccggagggggaaaaaaacctgaaagactggaaagagctgtgcagccgcagcaaccgtgccatcattgatacaaatgatttgccgggccggagcgatacatttgattatgcgtgcaggcaggggatcacgatggaggaattgagagtcagaatttcttccaccctcggatatgtggtgagagagctgataggggaggaacccgacagcacgctgttaattaccggaggcgactgcctgaccggattcatggctcatatcggccgtgatgaaattgcaccggtctgtgagatggcgccgggaaccgtcctctcagaaatcgatatcgggaacaggacatttgcggtgataaccaaatcgggaggtttcggaggcgaaaccctgatggtggatttggctgagaagataacaggctgcaaagaagataagagactggaaaagaaagaggagaataagtatgttaacacagtatacgcttaaaatgccgcacgcagtgtacagcggaaaagatgctcttgataaactgacgcagattattggaaccggcgtcaaaaaaaccgctgtttttaccgaccggggaattatcggagcagggcttttggagctgcctctttcaaagattaaagaatccggctgcgaatatgtgattttcgatgatctggcggcggaacccacctatgagcaggcgcagaaggcagttgatgcatttaaggaatcgggagcagattttattgtggccgtaggcggcgggagcgttatggataccgccaagctggcatccgtattggcaaccgatgagtacggggtaaaggaacttctggataatccccaaatggcgaaaaaatgcgttaaaacactgatgattccgacgactgcaggtacgggtgccgaagcgactcccaatgcaatcgtcgccgtaccggagaaagaattaaaggtcggcattgtgaatgataatatgattgcggattatgtcattctggacgctgtcatgattaaggagcttccgagaaaaattgcggcatccaccggtgtggacgccctgtgccacgcggttgagtgctttacctcaaataaaaagaacccgttcagtgatatttttgctctgcaggcattcgaaatgattatgaaaaatatagaaaaagcctgcgacgacccggaagcgcttaaagagaagaacaatatgctggttgcctccttctacgcaggggctgcaatcaccgcgtcgggtaccacagcggtacacgcgctgtcctatcctttggggggcaggtaccatatcccgcacggcgtgtccaatgcgattctcctggctcctgttatgagattcaacgaaccggtgtgccggggcctctttgcagaagcttacgaccggctggccgccggggagagcttcgcaacggaggcaaagagtgaggaagaaaaatcggcgtgggttgtaaaccggatggaagagattgtagagcatttgaatattcccaaaagcctgaaagaattcggcatcggcagcgaggatctggatgaacttgtggaagccggaatgggcgtgcagagactcctcgtcaataacatgagaactgtgacggccgaagacgcaaaaaaaatataccttgaaataatttaattagccgaatgaactgtggcaaagcttcaaaatcaggaggaaccaggtaatgaaaaaagtagaaattaaaggaattatcccgccaatcgtaacaccgatgaatgaagatgaatccgtcaatgagaaagaactccgcaaccaggtgaaccggcagatcaaaggcggtatacacggacttttcccatttggcaccaatggtgagggatacatattaaacgagaaagaaaaagaagaagttttaagtattgttattgatgagacaaaaggccgcgtgccggtttacgcagggacaggatgtatcagtacaaaggataccatccggcagtctcagatggcagaatccctgggagccgatgttctttccatcatcaccccgtcctttgccgcggcatcccagaatgagctgtacgaccactataaggcagtggcggaggcagtggatatgccaattgttctatataacattccggccaggacaggcaacgcccttgctccggcaaccgttgcaaaattaagcaaaattccaaatattgtaggagcgaaagacagctccgggaactttgacaatatgcttcaatatatcgaacagaccagggacagcaaagactttgcggtgctttccggcaacgattccctgattctctggaaccttctggcaggggggaccggcggtattgcgggctgcgccaacgtgttccctgaggtaatggcctccatctacaattattttgcggcaggcgacctggagaatgcaagaaaagcccaggacagtatccgttccttccggggctgctttaaatacggcaatccgaacaccatcgtgaagacggctgttaacctgcttggctacccggtcggaaagtgccgtgcgccgtttaaccaggtaccggaggaaggaatcgaggcgctcaaaaaagtgcttgccgagaatcacgaaaagggcatgtgctgattgacagttcggaaaacacgaataaaagaaaggcagaatatggctgagaaattaattcttggaatcacgatgggagatccggccagcatcggcccggagatcaccgtaaaagccctggcaaagaaagaaatttatgacgagtgccgcccgctggtaatcggcgatgcagcagtaatggaggaggccgctaagattgccggaagagaggatatcaaaatccgcgcagtccaatcggtcggtgaggcaaagtacgagtatggtaccatcgatgtttacgatatgaagctgatggatttgaacacgctggagcgcggaaaagtatcggcagccgccggtgaagcggcgtttgggtatgtaaagaaggtgattgaactggccatggccggcgagatagacgggacggtcacaaacgcgtttaacaaagaggcggtaaacctggccggacaccattattccggacacaccgaaatctatgcggattttaccggaacaaagaaatacacgatgatgctggcccatgaaaacttaagagtcgttcacgtatccacccatgtggcgctgagagaggcatgcgacagggtaaaaaaagacagggtgctggaggttatcaggattgcccatcaggcatgtaaagacctgggaattgaaaacccgaaggtgggagttgcgggactcaacccccacagcggtgaaaacggaatgtttggccgcgaggaaatagaagaaatcataccggcaatcggcgaggccgtaaaagagggaatcaacgcagaaggcccggtgccgccggacaccgtcttttccaaagcgaggggcggctggtatgatatcgtagtggctatgtaccacgaccagggacatatcccgcttaaggttgttggttttgtttataacgagaatgagaagaaatgggacgcagttgcaggagttaacataactttgggacttccgatagtgaggtcatctgtagaccatggaacagcctttgaccaggcagggctcggcatagcaaatgaattaagtctgatgaacgccattgattacggcgtaaaattagctaaaagcaacaaagtaaaaaaaggagaatagtggaggaaaaactatgaagaaaagtatgaaaaaactcgtttccgtagctttggcagctacaatggtattgggacttgcaggatgtaatgacggcagcagccagacggcagcgacaacggcgccggcagcggaggccgcaggtacagaggcagccggggcagaaagcggggcggacggagcacaagataaggcagaagcggccaatgcaggcctgaacgcaaatattttattcgcaacacacgaagtcggaacaagtaattataacctgtcggcagagcttgcgaagctgtgggaggaaaatggaatcggaacagtggacgttcagccaatctcccctggcggaatgggcgctccttacctgttcgagcagggcaagacagatgtctcctttatcaacggcgctcctgcaaaatgggcatttgaagagggcaccctcggcaaacctcctgtaaaaggatattcagccatgattggcggacttaccaacgtatcggccgtaaactttatgacaaaagcattcatggataaatacaatgtagagaccgtggaagaagcaatcagacagaaacttccaatccgaatcggctgcagcccggtaggctccatggataacgaagtggttcagattttactcggatacctgggagtgacggaagatgatatcaaatcctggggcggcgatgtagtgcacggcggcggttccgacctctccgctatggtaaaagacggaaagctggatttcatgcttgaccatacatccgtcaactcctccacgatgacagaaatcgcaatgacgtgtgacgtgcatttcaaccagtgggaagaggatacgcttgattactttgtaaacgaaaaaggtttccagagaatcacaatcccggccaactcctggaagggacagacggaggaaatcatcaatgccggtacgcctgactgcttatttgtaagggatgaactggacgaagacgttgtttactggatgacaaaatccatgtgtgagaacagagattaccttgtatcagtacttgcatccattgagccgtttgaccctgccacatgctgggagccggagaaagtcggcggtcttgcactccatccgggcgcagaaaaatactttaaagaagcaggttacatgaaataatcaggatttaaagtccggggggctgttaccggctcccctcttttaagagatattggaggaatgaattatgagtgaagcgaatgccctgaaccaggatcaaaagccagttagcaaattcgcaagccttccaaagtggagatatgcttcgttagttatactttccgtaatgttgattgctttccagctctatattgcgctggtgaggccgcttgataaatggattcaggtgccggtgcatctctgtctggctctggcaatcgcttttattcacaaacccgttgcggataagtgcaaaactacagtaacaaaagcgctcggctgggcctatgatattttcatgctggcaggtgttgcctactgtgcgtactattttatttctaatttaagttatctgcagaaccgtatctataacgtggacagcatgacgacagccgacctgctctgtgcatactggctgctgattatcgtcatggaagcggtaagaaggtttatgggtatgaacctgtttatctttatctgtgtatttattgcgtatgcatttttaggacagaaaatcagcggcatctttaaattccgcggtatgtcatggcagagcttcggcgaggttatggtcatggatccgaacggtatccttggctcgccgctgtcgtcttctgttaataccctgttctatttcctgctgttcggcgcattcttttcggtgtgcggcggcggccaggtcctgatcgatttaggcatgaaactcagcgacaagacggccggaggcccggcaaaggcatcggttgtgtcttccggactgatgggcatgatttccggctcagccgttgcaaacgtaacgagtacgggtgtcatgaccatcccgctgatgaagaaatcgggatatgagcctcaccaggcaggagcaatcgaggcggtggcttccaccggcggtcagattatgcctcctatcatgggtgtgggagcgttcatcatggcggaaatgataggcatcagttatacaagaatcgccatggcggccatcattccggctctggcatactacggttccgtattcctgctggttcatttcctcgcaaagaagaaaaaaatgaattctcatgacgaggccgttgtctgcaaaacagccccgattatgccgagaatctatcagcttgcgccgattattgttctggtagtcatgatatttatgggaagctctttgacaagggcagctctcgtaggttcggcgcttgccataatcgtaagctttatttcaaaagataccagaatgaacgtaagccagtttatcgatgcgatgctggacggaacaaaacaggcatacggaattgcaatcccgaccgctgcctgcggtatcatgacgggtattgtggtgcagtccggcgttgccaacaagctgacaaaaattattgcggcaacgggaagctccagccttgcgctggccctgattatcacaatgcttggatgtatgcttctcggtatggctcttccgacggttgcagcttacctgatcgccaacatactgttctgttccacactgatttccctgggaatcgacccgctgcctgccaatatgtttatcttctacttcggcgttatcgcacagataactcctccggtatgcctggcgtcctttactgccgccggtatcgcaggggcaagctcgtggaagaccggctggacggcatttgcctatgcacttgtatccttcctgaccccttatgtcttcgtgttccatccggctcttctgctgcagggaaccgttacggaagtggtggtgaatacggcgattatggcatacggaattattttcctggcaggcggtatagcaggttatatgtttgtacctataaagaacgtagtagtccgtgttcttctggcctgcgtggcagtatttatcattattcctgaaaatatcaccaccctgatcggaatcccgatgggactggccattctggtatatttctacattcagggtaagaagcacaaagaggcgaaagcatctgcaagcgccgcagcctagagcgtggttgaaaattaggagaaagacacaatgataattgacaaatttgacaatatccgtttttacagctgtatgctcaataatctggagaacggtctgcaggccgtagaggcgctgcgcaatccggaggccggaagatatgagttcgacggcggtttcttcctggttcaaaagggagagacaaagccgatgtctgaggggacatttgaggctcatagaaaatatgcagatgttcagattgtcctggagggcagcgaagaaatcgcctgggcggatctgggagatttaaaagaagacggggaatataacggtgacaatgataaggcggcctacacaggcgctgaagacaatgtgatgaggattacggcggggatgtgctatattgcctttccgcacgatgggcacaaagcggtgcgccatacgtcccggcagcaatcctatacaaagatagtcatgaaacttccggttgttaaataaaaaaggtaccgcatggtatggtgcggctgagaaacgcttatcgtttccggctgtgccatatttttttaagtttattattgttaaagcataaatgacttaagtaactatagtaacttttgtaacttttgtaaatacaattctgtgatattgactgctaatgtattggctgtaaataaataatttcataatcataacatatattcaggaaatgttaaagaagactgaaaatgattgcaaatgatccgatattagtatattttaaggtaacaggcatgccgtatgaagtatatttgaatgaggaggaaaagtattatgggatttgatgcagcaacgtcaacgttaaccctggatctgcttgcgactacgggatttgggtgtcttatggttttcctgggaaaagcaattgtacgaagagtaaagccgttccaggactgggggataccggcgcccgttgtcggaggacttctggttgcgcttattttaagctaccttaaaattacgggattgtttgcggttcaatggacctctacactcggcagccaactgatgaatctgttttttacctgtgtgggttttggtttcagcaaaaccctgctggagcgcggaaaaaagttctgtgcggggatagccctgtcggtgcttcttctcgtattattacagggcctgctcggaatgtttctggcccagatgctcggcctgcatcctctgcttggaatccagatcggcacaggcgctctggcgggaggcgtgggaactacatctgcatttggtcccgtatatgaagggatgggcgctgtgggagcgacggagattggagtttcggccgcaacagtcggcatgattctgggaagcctcacgggtggaccgctggccgtaatgctgattaaacggtataaattaaaagcggatccgcaggacggcgcgctgcaggccggaggcagtgaggagaaaacggcgctggatacgggaaaacttttaagcactatctgtatgataacgattatcgcagcctgcggcatcccgatttatatgcttttgagcatgataccatatattgaaatgccgtattttatcggatgtctttttgccggggcgattgccagaaatattctggaggctttccatgtggatatccatctgccggaggttgagacggtggagcatatttcactggatattttcctggcaattaccattatgaccatggatttgagcagaattacaaatgcggttggcccaatgctgattattctgtttgttgtgaccattgccactctcgttttcacttatttcataggattccgtatgtatcacggcgactataatgccgcctgtatgtgtgcagggctgattggtatgggaatgggatccggttccaatgcggtggctaatgagagagctgttatggataagtacggatattcccatatcgcctggatattgtatcctgctttttccgttttgtgtgttgacatttttaatccgttgtttatgtcgcttgtacctggttttctaggactgggaggctgattcgtttctggtcaggcaggtgaatctgaagccggtgcggccggcggaagggcaatagttcctcttccggcctcacgaaaaccccggattttgggttaaagtgcataaaaatgacagtgcattttcgtcgattatgtgcaaaaagtcaaaaagtccttgacatttattgtcaagctggtatactgaaaatagttaaataaaagaggttccggaatcggaatttctatttttaaacgcaaatgtgtaaacgattacacattaattcaatataacggttccagcccctgccgaaggaaaaatgggaagtgatttccctgaaatacaaggttattgcattgattttattttctgaaagtacttgcctgttttcttgtttcaaagtataattttttgtataaagtgtaatcgattacacataaacagcaaatggaatacgacaggaagacagaggggatgaaggaaattatgattacaatagcagatgtagcgagagaggcgggagtatcggttgccacggtcagcagggtgctgaacaagaacggtccggtatcgccgacagcccatgaaaaagtggcgctggccattgcaaagctgaattaccagccgaatgtgtggggacgcaggctgagaaggaaagaaagcaagatgcttttaatactggttccgacgatcagcaacccgttctactcatccattgtagccggaattgaggacgaggcaagacggtgccagtttggcacgatgctctgtatcgtcaatggagatgaagtaagagagagagagtttatcgagcttttattcgacggacaggcggacggggcggtgatgctctgtgttaataaggataacaggcatataaaggagattgcggataaagtgccgattgtacagtgctgtgaatttttcaaggatgccgatatagcgcatgtctccattgataattttgcggcggccgcacaggtggtgcgttacctccacagcctgggccataaaaaaataggatttgtcgggagtgtgaaccagtttatcagcagtgaggatcgccggaggggttatgaggcggagcttgagaagctggggctgcccataagaaaagaatatatggcatatgcagaccgtgattacagcttccagagcggtatctcggcggccaggcagttactggaccggccggacaggccgacggccgtgttctgcatttcagacgtattggccatgggggccatccgggcggccggaggattgggaatccgggtgccggaagaactatcggtagtagggtttgacgatgtcgaatatgccacaatgatgaacccgatgctgacaacggtgtcacagccgctttacccactgggcaagaccagcgcccgcatgctgatagatcagattgagtccggagaaggaaaggggaaaatcttcctggaacataagctggtaattcgtgattcgacggctcggcttgagccttagaataaagaaggagaagtatccaaaaagcaaaaacaaggaggaagcaacatgaaaaaagttttggcagtagtactcgcatcagcaatggcaatgtcccttaccgcatgttccagccagaaaccggcggagacagcagcggcatccgtagcagagacaaaggcggagacgacagaggcggcaggggaagagacaaaagctcccgaagcaggagaggaagtaacagacttaaaaggcaagatgatgggtgtcgttacaccggcagccgaccatggatttacagcagaatccattcagcactgtgaggcggaagtaaagatgcttgcagaaaaatatggatttgagtataaattcatgacagcggcagagtccggtgagcagagcaacgcagtagagacgattttaggaatgaatccggatgttatggttctctggcccgtaacgggagatgagttaagaagctccgcacagcaggttcaggacgcaggcgttccgttaatcatttatgatcgtttaatcgaaggatttgagccgacaagctggattatgggcgacaacgatgcaatcggtgaaggcgcaggcgaatatttcagcgaatacttcaaagatgaactggcagcaggcgaagttggccttcttgagttcaaaggcgattcctcaaccgtaccgatgcagcgttccaacggcttctggaagacagctgacagcaactttaagaaaatccaggaattctctactgactggagccagcagaaagccatggaacagatggaagatttcttaaacacaaagagcgtggaagaaatcgaatccgttcaggcaatctttacacatgacgacgaaatcgtgtttggtatcgtagaggcccttaagaactacaacggccctgcaaaattaaacattaagctcatctccggcgtttccgcaggcgaaggctttatgaaattattcgaggattccggtctggaaggcattgactttatgacctatacgttctccccatccatggtacgtgacgcagttgaccttggacttgacgtactggaaggaaagactctggagccaagctacctgatcccaacagagatgattgataaaaataattataaagaatacatggaatctgacttatacaagattcgttacagcttacagtaattttagaatgataagccggtcggtttcaaaccggccggcttatcttcatgatacggggaggttttgctaatgaaattggaaatgcagaaaatcagtaaggaatttggccctgtcctggcgctccagaatgtggatttccagatgggagccggtgagattcacggcctgctgggagaaaacggagcaggcaagaccacattgatgaatatattatccggtaattttcctcccacctccgggaaaattataattgacggaaatgaaattacaaatatgactccacagaagtcaatggaaatgaaaatccgattcattcaccaggaacttaacctgtgtaatgatttaaaggtttatgaaaacatgttcctgggagaagaacttacgaataaagcaggggtaattgataagaaaacagagattcagagggcgcaggaagtactggacggcatgaatgtaaagattgatgccatggcgctggtgtctgatctggaaacggcaaaaaagcagcttgtggaaatagcaaaagcgcttttattccagtctgagctgattattatggatgaacccaccaccgcgctcaacaatcaggagattgaaaacctctttaccataatgagaaggctgaagggccaggggtaagctttatctatatttcacacaagatgccggagattttcacaatttgcgacaaatatacggttctcagggacggcaggtttattgagaccggttttataaaggacatcaatgaacatcaggccacagagcttctgattggaaagacatttgtaaacgccaacctgaaggagcagcaggagccgtgcatgggggaagaaatcctgatgtcggtaaaagggctcaccggagaaacctttgaaaatgtatcgtttgatctgcacaggggcgaggtgattgcgattaccggcctgcaggggcgggaagcggggagctggcgactgctctgttcggggccacgccttcaaaaagcggtacggtcgagacaaggggcggcaggctgaatacgaagagtatcctcaatgtgatgcgccaccgcgtcgcgatgattccctgcaacaggaaggagagaggcattctcccggacctgagcatcagggataataactcaatggcatactttacgctgctgcacaagaagttaattatcggaaataaagaagagagcagccgttttgagaaaaacagaagcaagatggagataaaagtcggaagcgaaaaagacccaatcacatcactgtcgggcggtaaccagcagaaagttattgttgggcgctggctggagacagatgccgacgtaatgattatggataacccgacccagggaatcgacgtaggcgcaaaatacgctatttacaagctgattctggagctggcggcgcagggcaggggtgttctggttttcagtacggaatttccggaaatttaccagattgcagaccggtgtattgtaatgtacaagggtaaaatcaacggcagcctggagcgtgaagaattaaatgaggcgggcgtcatggcgctttctacaggaacaaaaacggaggtacaggtatgagtacggcaaagactacggacaaagactttaaacagatatggtcaaacataacgacaaattacagccactggctgagcttcatattactgatgattgtggcggtcatcatcaacccgtcatttctctcggttacaaacctgacgaaccagtttgtgcagggcgcgattgtaggtatctgcgcgatgggaatgagccttgtcatttcggccggcatgattgatctttccgtcggttcctcggtggccctgatatcgggactgggagtttctcttctgaacaagacacacagcattacactgtgccttttattctgcctgggcttcggcctgctgctcggcctgatcaacggaatttttatcaccaagggaaatatcgctccgtttatcgtaacgctggcgaccttttccgcttaccgttccattatcacacagcttgggcagggcggtccgtttactgttgataagagcatgtatgattcgttccgatatgtggcatccggcaagattttcggaataccgcatctgatgattatctttatcctgattacgctgctgaccggatttatcatggctaagacgaaattcggccgttatgtctatgcggtcggttctaaccagcaggcggcaaggcttacgggtatcaaggtaggcaacgttaagaccatgatttactgttacgctggtattctgtacggtctggccgcattccttcttgcaagccgtcttacctcaatccaggcggccagcgccggagacggatatgagatggacgccattgcagccgtagccatcggaggaaccgcgatggagggcggacgcggcaaaattataggaaccttcctgggcgtactgatgctccgtatcatccagacaatccttgttatggcaaatgtaccgccattcttaaacggtcttgtcagaggcctcgttattattgtagccgtgctggcacagtctaagaaaaaacataaataaacaattgtaatataccttttaaccgaacgacagaatacacaatttagggggaattatcatgtttaatataggcattatcggctgcggtaagatttctcaggtcaggcacatcccggaatatgcgcaaaatccggatgccaggctggccggatttttcgatttaaataaggaacgtgcccaagagctggcagtccggtatgggggaaaagcgtttgattcctatgaggaacttctggccgacagggaaatcgacgcggtaagtgtctgcgtggcaaataacgtccatgcggaaattacggttgcggctctgaaggcgggaaagcacgtactctgtgagaagccgatggcgatgaatctgaaggagtgcgaggatatggtccgggcctcaaaggaaacagggcgttttctgatgataggccacaaccagcggcttgcaaaagcccatgctgaggccagaaaactgatagaaagcggactgattggagacattatcacattcaagacaaattttgcccatagcggtccggagacctggagcattgacccgggacggaatgtctggtttttcgataagaagaaagcggtcatgggggccatggcagaccttggaatccataaaaccgatctgatccagtatctgacgggttccagagtggcggaggtaatcggttatctgggtacgctggataaaagagatgcctcgggcagtctcatcggagtggatgacaatgccatctgtatctataagatggaaaacggatgcatcggaaccatgactgcaagctggacctgctatggagcggaagacaactccacgattctctacggaacaaaaggagtgatgaagatttacagtgacccggcccattctattgtagtggagctgaagggcggagagaaaatctgctatgatctggataagattcagacgaatgacaatcagacaaagtcgggagtaatcgatctgtttatggactgtctggtccataatacgccgccggaaatcagcggggaggaagctctggcagcaatgaaagcagtctttgccgcggtagaaagctctgagacaggaaagagcgtgaaaatttcttaatgcaacgcaacagtaggtgtgtactttcggagtctccccggcactcatctttacggctgattttctgccggccgcgcacatatttattcaacgtacacaccgtgtacgcctcataaatatgtacacaaccgacaaaaaatcatctcgcaaatctgagtaccaggagattccgagagtacactggtaaaacaggaggtaaagaatgaaactgggacttgtaagcgcgattctggactggatgtcctttgaagaaatgatagacacgatcagcagcctgggctatgaatgcgtcgaggcggcctgctggccaagcggcaaggcggaacgccggtatgcgggcgtcagccacatcgatgtcgatgaactgagcgaggcaaaggccgaatatatcctgaattactgcaaagaaaaaaatgtggagatatcttctctggcgttttatccgaatacaatggacggagatttggagaaaaggaaggccaatattgaacacctgaagaaggtaatagcggcttcacaaaagctggggatcggcatggtgactacctttatcggccgtgatcatacaaagagcgtggaagagaatctgaagctttttgaggatatctggccggatattatccgcttcgcggaggaacaccgggtaaaagtggcaatcgaaaactgtccgatgctttttgacgagacacagtggccgggagggcagaacctggcaacgacaccgaaaatctggcgcagaatgttcgaaataattccgagcggcaatttcggcctgaattatgatcccagccattttgtatggcagatgatggattatatcaaaccgatgtatgagttcagggacaggattttccatgttcattataaagacatcaagctttataaagacaggctggatgatgcggggacgatggcctacccgctggaatacatggctccaaagcttcccggactgggagacgtggactgggcgaaatatgtcagcgcattgaccgacatagggtacaatggttatacctgtatcgaagtggaggacaaaagctttgagggaacacatgaagatgtaatcaggagcctgaagctcagtgcaaggtatatgagacagtttgtgatttaaaatgtcaggctaaaagtgccgttgactacctacatcccggctgaactgttactttaaaatttaccgtgaaggaacggcaggagccgcccggagagaacgttcaatctctctaagggcggctcctgccgtcttatattcaaatcctatatgcgtttcagactctgcgctgcgcagtcgcagaatttattaataatgggattgtggctgtcctttaggaatacggccatgatggcagtgacattctgcatttcccccatggaaaaatagatgatgggagtttccggccggatgctgctgatcgaggagcggcacacaaaggtcataccgcggttgctgccgaccaggctcatggcggaagccaggctggatacctcaatcgtatttttaggggtgaagtcatagtggcggcagacggcatccgccgcgatcctcatattctgccacgggtgcagaataatcagtgtttcatcctgcagggtggataaatcgatggggatggggctcgtaatattgccgcattgctccggaaaacgctgctgcatccttttatcatatgccgctgccagtaaaatgggatcgctgccgagcatacggcggcggaataaatctgactccggggccagattcgtcagcgccaaatcggctgtcctgttttccacccgccggatcagctcacggttattatattcatctatctgcaaattgacggagggatagttttcagcaaagtggggaatgactttcggtaaaacataggtgcctaaaaagggcagggttgcaataacaagctgattgatcgtacctgttttaattgaggcaaaatccttcttcatggcagattccagagcctgaaaccgttcaatgtattctaaatatttatggccggccggagtcaggccgagcggaatcgaatcgcgctcaaacaattcaacccccaattcatcctccactttcctgacaaaacggctcagggaaggctgagaaacgtataactgctgtgcggccctggaaaaactgtggcactcggcaattgccttaatatatttacaccgtctttgatcaatcaagaaacttttcctcctccccatgcctttaaaagtttaaccgatagtatcaattgaaatttaattatttagtttgttttatcatattaaattatatcagaagtgaaggcaatttgcaaaacatggctatacctttgctggtatagttttatgactcttcaggcattggacataaaacgttttgaattgtacaatatacctaataaaaggcgcctttttatggaaaaatacgacacattctctaacaaaagggggatataaataaatacaaatcacgcaagagatctgcggaaagttcttgaggaaaataagtttctgacgctcccgggagtttatgactgtctgtcggcccgaattgcggaggaggccggattcccggcgctgttcctgtcgggcggggcgcttgcctacagcgcgcttgggcggccggatctcggattcctgggactggcggagtttggaaatgcaattcagcatattgtgtcatcctgccgggtaccgcttctggcggatgcggacaatggttttggaaatgcaatccaggccgccaacaccggagccatgtacgaacaattgggggccgcgggcctgcagattgacgataaggtgcttccttccacgcatcccgccaaaaatgagatcgtgggatgggagatggtcggaccaaagatagaggcagtacgtgataacgtatcagaagacttcgttatcgtctaccgcacctgcgccaatctttacggctacggtattgacgaatccatccgccggattaacctggcaaaagaacgcggggcagactacgcttatgtggatgggattaaatcagtcggggagcttataaaagtctcggaagaatcgaaaattccgctgatggtaaatatgaatgaaaaaggatttgtaggaggaaatgtagcaatagagcagataagggagatgaatttttccataggactgtttccgatttcctccatgcttgcagcttcccagggaatgattgaggtgatggaagctcttgcatcccaggggacgacacttggggtaagtgaaaagatgacgaatccgcccacgcggatccacagtatgatggggcagttttccctggtggagaaatattcgccctattacgaccgataactctgatgaccataatccactcataaatccattcattcttgatagcggaggttttaaaatgacattgacagatgtattaaaggattttgcctatctcagcacactgctgctgatcgggtttgagcttagaaggcgtatcagaatttttcagaaatattttattccgtctgcgcttatagcgggaactatcggtatgtttcttggaccgagctggcttggcaccgtatcgcctgtttacattccgttcagcggcggaatcggccagtggtcgggagcccttgtaatatttgtctgcgccaccatgttcctcgggctggaactcaataaggtcggacgggacgggatggcagccacgtttttggccggtttctgccatcaggcccaaatgcttttgggactggctattgccgcggtgttcggtctgtttattgccctgccctatcaattcggctacatgggcgtctgggggttctatgccgggcacggcaacgccacaaccgtcggaaatattatccaggatgccggttactgggacgatgcggtgggcgttggcgtaacatttgcaacaatcggtatactctgcggcatcatactgggaatggttctgattaactatggagctaaaaagggatatacgcatgtaaaaatgaccttcgacgagatgcctgaatcagagcggacaggatatatccgtcccaaagagcgtacgtccgtcggtaacggcgtcacaaatgcctcttccctggatccgctggcatttcagctggctatcgtaggggtggtcgtggtagtcggagtgatgatccgggcatgcctcttgaaaatcagcccggttatgagcgggtttccgctggtgggagctgttcttgtatccagcatgctgatcggattttttatcaacaagacaagtctgagggagcggattgaccggaaattaatgagccgcatcaccggcaccgctctggaatatatgatcacggctgcgattgcaaccacctccaaacagatttttattacctatgctctgccattaattgccgtctccgttgcgatggttctggcaaacctgtacggaagctttgtacttggcaggcgctggctggaagccaactggtttgaaaccggagtgggcctttttggccagtgctgcggagtcctggctaccggactgatgctggtcaaggtaatggatccgtataatgaaacgacggcggcacaatgtatttccacatccagcaccctgggttatgcatggcagataccctatatggtggtcggttccctggcaatttttaccgcgcctgttcctaccacgattgtttccgtaattctgctgctgttcttctggatcggcggagagcttttatacggacgtaagaagcgggcctagagcgtgtctaaaaattcattccagccatctgcacgccccgcttcgcgacacagttttagaaataaccttgagaggagataaaatcatatgaagaaatttaccgtgggagtaatccaaatggattcccaggacaatgtggaaaaaaatctgcagacagccgtcgaatttatcggggaggcagccgccaggggggcaaagctgattgcaatgccggaaagcatgaattatgtggggacggataatgcgggacacgcggaaaatataccggacggcccgaccttttgcctgatggcggagcaggcgaaaaaacaccatgtatggctgcactgcgggagtatctatgagaagaatgaaaaggatcccagaccttataatgcaaccatggttatcagcccggagggagaattggcggccaaataccataaaatacaccccttcgacgtgataattccggacgggccggtgaacaaagaatcagaccgtatctgtccggggagtgagattgttacggtggatacaggggaagtcggatgcctgggattgtcgatctgctatgatatccgttttgcggagatgtaccggatcatggctctggaaggcgcccagcttctgctgacaccggcagatttcacgatgccgaccggcaaagatcactgggagaccatcctgcgcacccgcgcaatagaaaacggatgctacgtcatagctccggcccagtatggcgtgaaaccgaatttccaggcatatgccaattctgttgtcatcgatccctgggggaatgtaattgcccgcgcatccaacaggccgcaggttattaccgcggaaattgatctggactatcttgcccaggtccgcaggcagatttttactttggagaaccgccgacccgatgtatacagcctggcaagaaaggtttagttaagcaggtgaggacgccgccgcaggacttcgctaatcagcgatggatttaggcggcatcctcagactttatcttcccctccgcctcaagggagtgcaaacggtccccgaggcaattcattccggccggattcccccctccacgaccaacctcccacggggacggaagtctcaggcagtcccctctcgccacaccggacatggtccgttccggacgcgttctccgggcctcagttaaatccccatatcttaagaaatttccccataaaacctttactgttccccatatttctgttataataagacactgttgaaaacttcaataatttgacgcgttaaaggagaaattacaatgtctgaagataatcaaaaaaaccgtcttcccctgtctactgatgagacaacagcagccggggaaactgccagacgcctgctggaggagaaggatgccgacgcgaggacgcgttcttacaacggttttttcgggatattattaacggttctgcttacattttgggcggtattccaaatctatgtaaatacgataggcgtcatgagttccatggatcttcgcatgtggcactgcatgttccttctggtatttacgttcctgctgtatcccacggtgaaaaaagagaagaaggtgagaaatgccccgccggtttgggacgtgcttctgattgctctggctataggggcctttggctacatgctgcttaattattcccggattgcccagtcgggcggttatctgacgaaacgggaaattgtgatagccgcgctggcaatgcttgtcgtgtttgaagcagccaggcgggcctgtccgagccttgcggtgctgggacttatctttctggcatataattttttcggaaaatatataccgggaccattggggcacacgggtttttcgatgaaacgtgtcctgagccatatggtctggggcagccaggggatcttcggcgtcgggattggcgtaagtgcgacctacatattcctgtttgtattgttcggatcatttttaaaatacagtggattcagcaaatttattaatgatttgtccctgactctggtaggccgttctcccggagggccggcaaaggtagccgtactcgcaagcgcccttttgggaatgattaacggaagcgctattgcaaatgtggcgacgaccggaacaatcacgattcctctgatgaagaagaccggctacaggaaggagtttgcggcggcggtcgaggcggtcgcctctacgggaggacagtttgcgcctcctatcatgggagcagtcggatttgtcatggcggagttcctggggatcagctacagcaaggtaatgatagcagcctgtatccctgcattcctatattatatgggtctgctgctggccgtccactttgaggcaaaacgactgggactaaaggggctggctccggaaaacattccgaatgccgtggaagtactcaaaaaccaggggcatcttgtaattcctctggtagtcctgattggaatgattgtactggggtatacacctctctatgctgcggtattctccatatttgccactatactggcctcctggctccgcaaggaaacgaggatgagctttaaggatatcgtggatgcagcggtggagggctccagaggcgctgtcagtgtcggagtatcctgtgtggtgatcggagtgataatcggtacggtttccctgaccggcctgggacttacgataggatatctgattctcgaagtggtcggtgaaaaccagctctacttgggcggcctcatggttatgatcatgagcatcatcctggggatgggtgtgccgggtgtggctgcctatgtaatcgtggtggcagtggcgattccggtcctgatagagattggggcagtgcccattgcggctcatatgttctgtctgatatatgcctgcctgtccaatattactccgccggtggcgatgagttcctacgtggcggccggcatagcggattccaatcagacgaagacctccctgcttgcggtcaagcttgggctgaccggatttatcctgccattctttttcctgggaaatccggtacttctgattggcgtgacggatgcaaccgtcctgacgacggttcaggcgacgctgacagcctgcctgggtgttgtggctctggcctccggtcttcagggaatgctgttttgcagatgcggctgggctgaaagagcggtgttactggtagtggcattcctgagtattgaccctaatatggtgacagatgtgattggaatcggcctttttgccggagttttcatttatcagagaatgaaggtaaagaagagcggggaagaggcgcctgcggtaaaagcgcagtagctccacaatatataatctaagcattttaaacacatttaataaatgaaagagggaaaagaaatgaaaaagtcaatgaaaaaattagttgtaatgggattatgtgcggcagtgaccgcagcggctctgactggctgttcctcaggcagcggcagcagcgccaaagcgccggaaagccagagcgcacagggagaagacgccggacagaaggaagatgcgggacaggaaggaagtgccagggaaactgtcaatattaattttcctacggcagccaccacaggcgctctctatccgcttggcgcggctatcaccaatgtctggaatacgcagcttggctatgttaaggctacctcccaggcatccggaggcggtgtggataacctgaatctgctggcggataaagaagctcaggtaagtattgcgatcagcagcaattgctatgaatcctatacgggaacaggaacatttgacggacgtaagaatgaaaatttccgtgtgattgccggactctactataatccgaatcaggttgtggtaactgccgactcacagattaacacgcttgccgacgtaaaaggaaaacattttgccagcggtgcggtgggaagctcaacagagggggagtccagaaatcattttacagcagcaggcctgacctatccggatgatatcaagattgaaaatatcggctttacagaggctgtggatatgatgcgcaataagcagctcgacggcgcctggattatggcaggattgggcaactccgccgtgacggaggcggcatctacggcaaatgctaagattctgagcattgatgatgaggtgattgcaaagctgcaggatcagtatccgtggtatgcaaagttcactatcccggcaggtacgtactccggtcaggattccgatattcagacgaccgcaatcaagatggtgatgtttaccacggcggagctcgacgaggatacggtatatgatttgacaaaaacattttgggaaaatgtagacaaaatggcagagagcaattccgtgctgaagggacttaaggcagaggatgcggtgaaggacattgcagatcttcctcttcatgacggcgcggccagatattataaggaaatcggcgcaattaaataagccggaacaaaagcaataaggatataggataaaaacggacgtctgtaccggaatgagatatcatacccggtgcggacgtccgcattttattgatgacggggcctgtgcgcggagcgtgcaggttatcgcgtatcgtttccgtttttaaataactttatatcaatttagagtaaagatgttattgcaccgctccttcgataaccttataatggtaagaacagaaaaaataaacaaaaaaataacaaatggaacaggggatcagaatgagaagttttatcattgcagttaacgcggtaatgccgtttttaatttatattgtgttcggatatggggtgaggctgtgcggcctggccgatgaagattttatgaacaggctgaataaactgattttcaaggcgttttttccaatccttatgttcaacaacctgtacaaggtggatcatggccttgtgttaaattggaagctggcggttacggcagttctgagcgttttaattctgcaggctctgctgatcattacgattccccgcatggtaagcgaaaatgcaaagaggggtgtaattatccaggcaatttaccggagcaatttcgttttgttcggcattcctctgaccgcgaaccttttcggtgacgagggcgctgttcttgcatctatgatggtagccatcgtaataccggtttataacgccacggctgttattattctggagatgtttcacggcggcaggacaaatccgatggcgctggtgaagaatgtctgtaccaatccgctgattctcggggcgctggtgggattaatcttttatgttctgaacattaaactgccatccagcgtggagaccccgatcagccagttcgccgctctgaccacgcccctggctctctttgtactgggaggaactctgcatttttccgcaatcagccataatttaaaatatattgtgccttcgatggcagtgaagctgctggtgctgcctgcggttatcaccgtgattgccactatgattggctttaataacctggaacgctttattctgtttgagatgtatgcgacgccggttgccacggcatcttattcgatggcccagaatatgggcggtgacggagagctggcgggccagtttgtagtattgagtacggcggcatcggtgtttaccatctttttgtgggtatttttctttacgggaatgggatatatcggataatatgtattaacggaatcgtgagaggagccggcggctatgaagaatgagtccgggaaaaccggaaattctgctctgtacaggcggatttctgaggatttatatgggagatttctgcaatgcgggcgtggccccggttctgcttgacgatgtgcgtgaggatgccggaatactgacggagggaaacttcgacatggttgttacaacgatcaaccagattgtgatgtctcccggcaggctgtcgatcagccaggtggctaagatagataaaagacagacggcagtcctcatttatcaggatgaatggtacctttacagtatgaaacgctatcggagggaattggcgatgaaaggcaggggggagtatgtccgggcaggggaggctctttcttatctggagcaggcggatgaaaaagtaaaagcaaaaagtgaggaaagagtatgaatataaagcagatgattgcgaagggcctgctgatttccctgatggccggagcagtaaccggctgttctgccgtcagggagaaaaatattgtttttaacagcgctcaggaggagcctccgcagacaaatctgacttttttcggtttcaaatatgaggctctctaacttctatttgtccacgaagatgcggacattcgttccgtctgcggcctccacattgacaaaatcaccttcaatctcaccgtccaggcattctgaaactgcatccatcatactggtgagatcgataccctttaaatctttttcaggtatagggagcttccccgtcactttaaggatttttttaatggcgcctaccgggaactggatcttcaccttgtcgcctgacgtgctgcttaccaggatacggaacatcttcttatcatagctgcttctgcttttgggtgccgctgtctgcagttcctgtgggtccgtgttcatggccgacatcagttcggcgccctgctctgcggtaatggtcccttcttctatcatttttaatattcttaattgctcatccataatgattctccttctctatgcatcgtttattttaactgttcaattgcctgttccaccgttatttccccgttttcaagggctttcagaatctcttctttcttaacggcccggtcatccgtccctgcttcgtatccgagcttcttgattactgcgtccagcttggagcgcactgtgggataggagatgccaagttctttttccacctctttgatattaccccggcagcggataaatgtctctgtgaagtacagttcttcatctgagagataatcgaatttgctgagcctgaaattattctcaattacggtatcacaggaatcacatttaagtctggcaacggtaagctcattattacagaccgggcaacggctgatgacttttttcatcttgtcacttcctttctctatacaagtaatatagtcctaaaatttataaatgtcaatgataaaattaatatatttaattaaaatattaataatatttatttttgatgaaaaataattgatttccaatttccattattaaaaatgttattggttcacatgaagttattcggccgctctgtaaaaaaatgcagtaaaggtgcaaaaagaaagaacatgcatctatagggggcatcaacctgactccaatatgctgccctatacgattggattattcctcatctttgtcgtacagattgtactgtgggtggtgctgaatcttccggtcggtgttggaacgggagtatggctgtaacttaatcagccgtccggtcctttctggtaacggcaccggggggaaatatggtactctttaattttatactggagggtgcggcgggatatgccgagatattcggccgccttttcccggtgtcccgaacattcggaaagagcgcggagaatctgatcgcggcttgggccgcgcctgctgcagtggggagacggcaagtcacaggatgcagcggaatccggtttcgggacggaagaaagcatgccgggcgggattacgttaatctccctggcggccctcggggtcatcacaaccatccgttcaacaaaattccggatttcccggacattgccgggccagtcgtattcctggacttccttcagtacaatatcggaaaagcttttctggatattatatttctggcagaaatagtggagaaagtggagacatagcggaataatatcctcccggcggttgcgcataggtggaattgtgaggggaatgacctggatccggtaatacaaatcttcccggaaggtttttgcctgtaccatctcgctcagattccggtttgtggcggcaaccaggcggaagtcaaccttttttatcctggttgaaccgatccgctgtatgcttttttcttccaaagtacgcaaaagctttccctgcacgctgagaggcagggaattaatctcgtccagaaacaaggtgcccgcgtcggccgcttctacaagacctgtcttgccttcgcggctggcccctgtaaaagcccctttttcgtaaccgaataattcggcttcaatcagattttcagggaaagcggcgcagttgaccgtgataagcggctgattcttccggtcgctgttatcgtgtatataatgggcaagtacctctttgccgctacccgattcaccgtaaagcagaaccgtcgaatccagggaggccacattggcggcaatagaaagaagctgtaaaaaggcctggcttttggccacgattgagggcttttcggtgactgccgggatattgcttccgtaatttacaattttatgttcctttagaagggcgctgtaaagctcctcaaaagttttgacatcctgaaggagggttatgacatatttgatatttccgctttcatcgaatatcggagtgccggttacgatgcgcattcgtgcattgccctgcggattatggaaccctttgtagtactgaagacggctgacgcgctgtttcttctccatgaccagatcaaaaatgcagacatccagtacgccgagaaaatcatgtacgttcatttttaaatattctgaacgaggaatattccgccagtttataagggcggtattgacaaagagataatttccgctcctgtcatacagggcaattcctacatcgatattgtccagaatctcggtataaggaagctggctgtaaagatccggtgttgtcatgggagactcctttctgctgtgccacgtttggtcttaaattgattagattatagcattatcaaagaaaaagcggtagatgattttttcagtcatccgccgctttcctgtcgctggagatatcacaataattcgctgaaagtctgtatccgtgtacggagctgttcatagctcgcattcaacgggtcaatctcaatcgtgagggctggatacccggattttcgcaggtctgcttcgaaatacggctgatcatattcttccggatcacagaacttcatcagacagttaatgacgccgtctgaacccgtttcacggcagagggcggccaggagtgttccccgcggtttaccggtttcatggatcaggctgcatccgtgccgggcattccattgcagagcgaggcgtttcaggccgccgccccctttggagggggtgtcggtacggtactggcgcatttcctgagcgagatcgtcgcctgccacggcaattttgttttcagccagtatttccaggatgtcgtccggttctgccgtaatgccggtgagaaccacttttttaccggaaaaaggatgagagggcagttgttccagtccctcggtaatgtcttttacaatagcgctgtgttcgctcttttcaaagaaaaaagcgctcttcatcacggcatggcgtatcaccggagtgataatatcgagatggagattagatatttctgcaaatttcctcattacggcattatgttcattgtagatttctattgtattgcagagtgatttttcactcatcatatttcccgtgatagtggaaagcatgaggagtacgttctcatattcgctgatcagataatccacactggcccggcaggcgcggttctgcggatacacgatggggatcatcggaatggacgacacgccgaaacgccagttctgggtcatacagcgcagtgtatcgcaggcggccgggatgatgacggccgataaaccctgataggccccctttaaaccaaattccatgtcggcctgcataatcggacaggcaaaggcgggagataactcttagccagcgccagttccgtccgcccgccccacagccccatgggaatcatgccggaagcatgaaccagctcctccggcgtataaggaggaaagcagcccaccacttttttaccttcggagagatattgatccagtttggcgcgcgggtttttacaggcctcccgcagtatcttgatgctttcatataaatcagccatgttaaaagccctccttattctgtctcatcacttccaccagcccctggatccgtgtctcaaactgcgcttcactgtagttgcggtagtccgcctgatcgccgtcgaatgaggtgtaggggacgccggctttcttagaaagctgtctctggacttccatcatctggcagtccataaccttgcagcttctgttcacatggtagacggtgccttcgcagccaaaacgctccagagcttccagccttcgggaaatcatagtggaggcattgtcgccgttggtggaggcaaagcagtaggcgcgggccattccgtccagatcctcatattcgattgcccatgctttgccatagctggatgctaccatattgacgccgtattgtttcagggttctcaggttatggctcaggtaaggccagcaggcgattccgtcccaggatatgcggaattcctctttaaccggaaaggtggaggttccatcggcgatatgctgctcaatttcagcattcagctgttcaagaatttcagtcgatgatgtcttgccgcggttacataccatggcggacatatagttaaaaagttcaaatccgctcaggggagagggcttccgatccagaagattattggcccgttcccagagagagctgtttgtctggctgatccgcataacctctttaaatctctcttcatcccaggacttcccggtaaattcacacaagtcttcaatcagccggtcgatctgctcccggacatagcggactctggtctcggtcacataatcgtagggattataacaggtatcaatgaaaaagattggaatatccatctgtcttgcaaggttttcataccatttggtgagctggttgcagatattattggtcaggagcaggaaatccggcttcaccatttttcctccgtcgggcagcgcaatgctgctttctccgtttaatactgcggcataggccagattcacctttgcgtaggcacagagatcgtttgagtatccgagggttccctcacattcctggagaaaaggatcggcctgatgtcttgcggcaataccggccgagtggttttcagggtagaggatgttcaaaccgagggtttccgcaatttcctggggaaagatggaggcggaccagcccaccttttccccgcgttcctttgcaagcctggcattttcaaacagagcgtctgtctgccggccaagcattatcatactaagcggcctgggccgctttggctttggcgccgcggcattggccgcagcatttgtcatattgtcactcatagcagagtttctcctttccttttctgtttcagcggacttttccggactgatacatggattcaatctgtgcttctgcgtatcccagttcctttagaatcccggctgtgtcgcacccgatgggtcctgaagtccggcaggggatggaggaggcgtctacagaggcaaaatgaaccgggccgttggtgaaaacggttttagttccatcagaatattcatggaaataggtgtagtggtttgcctgaacctggggatcataggggacatccttaaaatggcagacaatttcgtggggcagatcatgggcgtccagaagttcatgccagtaggaaacaggatgcccggagaagatggaatcaaggatttttgtcagctcccgtttactgtcttccgtataataggcctgctgcgtggaaaaacgcggatcctctgctatgtcaggatgtccgattgctttgcagaactcgctgaaacgccggtaatccacaatggccaggtaaagccactcgccgtctgaaccctggtaagtattgctgccggcgtggctgcaattatagcggtcacgcgggaatctgcgcccgttaaagccatttaaaagtcccgtagacagaataaaggtgccggcctggagcagggaaacatcaaccttatccccgaggtctgtcacggttcttttgtaaagggcggctgcaataccggccgtgagggcgactgcgacactgtgatctccgagtcctgccacggtcatgatcggcggaccgcctgccggagccagatcacccaacaggcccgttcgggcacagaatgccgtataatcatagccggggcggtatttttcggcgccttcgctgccgtatcccagtacggaggcgtgaatcagtttcggaaatctgtctttcagctgctcataggtcagccccattttctctaatgtgtgaatacggtaattcgtcagaaagacatcggcctctgctatcagcttcataatggcaccgaggccctcttcagaacgcagatttaatgcgataaagcgcttgtttatgttctgcatatcaaaattagggtttgcttccccggtgcagggagagagggaagttccgtactgctcgcgccatgcgtctccgttcatagactccaccttgattacctctgcgccccattcagccagaatgcgtgcggtcatgggacctgccagcatcgtggacagttcaataacttttataccttccataggtttcataaattagttcctcctgtctgttaatctgttaaaatctgttttccttaccggcctttaaagacggcctcccttttttccatgaaagcagcggttccttccatacgatccccagtgctgaaagctactgtctgtgcgattcgctcgaacagaagtcctgtgttgatatctgtatccattccgacgttgacagccatctttgccatagtaatggccacgggcccttttttcataatacaccgggccatttccacggcagcgttcataacagcctccctggaatcttccgtcacctggtttaccagaccgatatctttggcctccgaggctgtgataatccgcccggtataaatcagctctttggctctccccactccgatgagcctgacgagacgctgtgttccgcctgccccgggaataatgctcaggccggtttccggctgtccgaaccgggagcgcccggtagcgatacggatatcgcatgccatcgccagttcacagccgccgccgagggcgtaaccgttgatagcgcagataactggtttatagagatcctccagctcctttaaagcagcagaggaggtgccgtgcagcatttgcaggtaatcacgatcgtggatttcccggatgtcggcgccgccggcaagggccttgtccccggcgccgctgacgattacagcctttatggagtcatccgtccgtgccatctccacggcagagcggatgtccctccacattgcgggggtaagcgcattgcgcgcctccggccggttcagcgtcaggtatagaattccgtccagtatctcatataaaatattttcaaaatccttttcacaattcatcagtgtgtctcctttcatgctcctccggaatattgggggagccgttttgctttttaaatttatataaagcaagaagcatgccaatagggcgggagagaaggaaaattgaagaaaaagtatagaagagggagaaaacatcaggcataaaacaaagctcaaacggatgtgaaaatgtgcaaaaatgcacttttgtgcaggaatttcactttgaatgcacaaacgctgcactttgtagctgcacccaatgaagccgggaggtcctgctgtagaacgtaaatataacgaaacagaagcttaaaccggagagaagcgtttaaaggagaaaagttggcacgcttattgctctattaatcagcagcagctttgtaaaagtcagaagcagaaaaaggaggatcttcaaatatggaagacgtatatattgcgagcggcgtgcgcacggcaatcggcagatatggaggggcgcttaagagcctaccggcccatgtgctggcgtccaccgttatgaaagaagcggtaaggagggcgggaattgacgcggaacggatagacgaggtaattctgggagaggtgcgccagagtacggaggcttccaatcttgcccggtgcgcgctccttggggccggctttccggagcatattcccggctatacggtaaacaggctgtgtgcgtccgccatgcaggcggtatacagcggatgtcaggagatttggctgggcgaagcagactgtattgtggcgggaggaacggaaaatatgagccgcgcgcctgtttacatccggaacggacgctggggcgacggcccgatgacattagtggattccaacatagaagccgggacaacggcccagcccgtgtctgtatatgggacgggcctgagtatgccgaagacagcggagaatgtggcggaacggttcgggatcagccgtgaggagcaggatcgtttctcggtggaaagccagaggcgggctgcggccgccatggaagcaggatatttcagagaggagatagtgccggtggaggtgagggagaaaaagaagtcttttatttttgataccgacgagttccccaagcctgccacaacgatggaaattcttaataagttaaaacccattgtaaaaccggatggcactgtcacagccggaaattcctgcgggcttaacgacggcgctgcctgcctggtgctgatgagcggcagaatggtaaaggaaacgggggtgaaaccgattgcacggattgccggcattacccgggccgcgctggatccgacgattatgggatatgggccggtgattgcggcaggtaaattgtttgaaaagctgggaatgacggcggcgcagatggatttgacagagctgaatgaagcgttcgcgtctcaggcagtcgcctgtatacgtgatctgaagctggatccggcaaaggtcaatataaacggaggggcaattgccctgggacatcctttgggatgtacgggggcacggctgcttgtcacgctgatccataatttgaaacggaccggaggcagatacggccttgctactctgtgtataggcggtggccaatcaatggcggctgctgtagagatgatttaataatcgagctttattcaaaaaagtaagagaggtataattatgaaggcagaagaaataaaaacgatagtcgttatcggcgccggagcgatggggcagcaaatcgccatgaatacggttatgaacggcaggaaacatagctatcaagttattctgtgcgacagttttgaaggtgcaatcggcaaagctgagaagtgggcgtctgattatctgtcgggccgtgttgccaaaggccggctgacacaggaagaggcggataaaattgcggactgcctcacaattaccaaggatgtagatacggctgtgtccgaagctgattttattattgaggctattattgagaatcttgaaattaagcgggagctgtttcggaaaatcagccggatatgcaggcccgacgcggtattaggtacaaacagttccaacattgtaagttccaggcttgcggatgtaacggttaacccggaacgcctgctgaacattcattactttaatccggctttggtaatgcagcttgtggagctggtgaaaggcgggcatacatcggaagagacgattgaggcggcaagagtattcgctgagaacacggggaagacaccgattgtacttaacagagaaattgccggttttgtcgcaaaccgaatcaatgccgccgtagtgcatgaggcgctttcgcttctggaaaaaggggtggcaaccgtgaatgatattgacacggcctgtgagaaggggctgggctatcccatgggaccattccgtctgatggatctgacggggattgatgtgaattattatgtccgcgtagagcggtttgcagagagccaggatccctttgacgcgccgaatccgcttgtaattgagaagtttgaaaagggtgaatatgggaggaaaaccggtaagggatggtatgagtatccggacggccggaaataaatagtaaatgggacgaaagaaagtaatgtaaaaaagggggaacaaaatgacttcaagtacgattgccattattataactgtaataacaatgattctgttctttattaataaattaccgatgagtgtggtggcctgtatcagtacactggccatgggcatcttaatcccggaaatgaagctttctcagatatattccggtttcggaggaagttccattgtcatggtagcaggtatgtgtattgtgggagacgctctctttcagacagggattgcacaaaggattggttcaaagattgcatctaccccgattgcaaagaatgagagggtgttcatcatagcaattgttatcatctgtaccattatgagcgcgtttttatcaaattcaggctgcattgcaatgtggatgccgatcatcgcgtctattgccgccggttcgaatggtaaaatacgttccaagatggttatctttccggccggtatagcctgtattatcggcggggcctgtacgctggtaggttccgtctcccaggttacggcaaactcgattctgatgggatatgccggctatgaagaggggctgggcgtttttgacatgagccgtgtaatggttccggcagcaatccttcaagtggttttctgggcaaccgccggttattcacttcttaaatgggcattaaaaccaggcagtccggattttgataaaaataattcatttgccagccagccgagtgtcaccaaagaaggcatgccggatattccacgttggaaaggaactctgtctgttgttgtgctggtaggctgcattgtattgtttatcctctgcggttttgccccctttaacaagtatttcaatattgccaatattgctcttctggggctaccatcctttttgcaaccggttgtgttcctgtaaaatccacactggcagagctgccctgggacgtacttatctgtatcggcgctatcacgggactcggtacagggctggatgcatccggcggcggtgcgattattgccggctttgtgctgaatctgtttggaggtgagagcgcttcagtaattgtccttacggttgttattaccatactgaccagcgtcctcactctctttatgcagaatggcagcgtggcggccatgcttacgccgatctgtatttccatggcgctggcactgggaatcagccctgttccatgggttgtagtaattgcaatcggtacgaaccttgccattgcatcgccgattggaactgcggtgaacatgcagattcttccggccggttatacgttcaaagactttgtgaaaattggaggaccactgttcattatcatggtagccgccgtgtcggtattaagctgcatggtgctgttctgattgcacatacggaccagggagaaagtaacaggggctgctgcaacagtagataaataatgtactggagcagcagctccttttctgccccaaaataatgatgatgttgaattattgtggacttgccattataataaaggatgttttggggataatcgaatgaagaaagagaggaaatgttgataaaattatgaacattaagaacgaatataaaggcattttttatatcgtcctgtcggcattctgctttgccgtgatgaatatgtttgtccgtatggcaggagatctgccttcgatccagaaaagctttttcagaaacctggtggcggtggttttcgccgggattcttctgattcgcgggaaggcggtttccgatggcagaagagaagcaatgcgggatacttttttcttcgttccctgttcggcacgctgggaattttatgtaacttttatgcggtcgatcatctcgtgctggcggacgcatccatgctgaataaaatgtccccgttttttgcagtcctgttcagtttccttatcttaaaagagaaggtggctcctgcacaggtctttatcatcctgggtgcatttttcggcagcatgtttgtcgtaaagccgaccttcctcaatctggcatttattccgtccctgatcggactggcagggggaatctgtgcgggcctggcctatacgatggtcaggaagctgggggagagcggggaaaaaggcccgtttatcgtcttttttttctcggcgttttcctgcattgtaatactgccgtggctgctgcttcactatgaagcgatgacggcggcgcagacggtaatcctgcttcttgccgggatggcggcagcgggaggacagtttgcaatcactgccgcctactgttatgctccggccggacgaatctcagtctatgattactcgcagataatattttccacaatactcggtttcttcgcctttgggcagattccggataagtggagctttgcagggtatgggattatctgcgcgatggcggtggcgatgtttctgtataacaacggggcggtaaaagagaatgcaaaatgcaggtttccataggctgaaagccagcggaaacctgcatttttgcgctttatattgatggcggtaccctgtgcgcggagcatgcaggtcaccgccgttttaggactttatctttgtaaagcgataatgaggataaatatacagatttagacaaaatgtcacctattagaaaagaattgtatgaattttatcaattctataacatttaatagacaagtctgaagtaaatagttataatagtatacaaatgtgcggggagagaagagttttatgcggtttcatgaatggaaaaagcaggcttgaactataataaaacagataaatgaaagacgtttcattggggagccgcacatgttgaaccatcatcggaatgactccgaaagatggtgattttttttcgaaaatatcagaagctaaggtggtgaggagatggtcaaggacacgatccaggccgtaaaagaagcagaggagagggcagctgagatgattcaaaaagcgtctgatgaagggaagaccctggttaatcaggcgaagagcgaagcatcaaagatgcgtgaggaagccctcggggaagccagggagaaggccggaaagatccgggagaaactggcagaggaaggcgcagattatctggaaaaggcggttgctgcggccgaggaagatatcgcttccctgaaatggaatgccggaaagaagacggaggaagtaatcaataaggttatttccgagctgatttaacggcgcaatgacagaatgttaggagggatgcggacatggcagtattgcagatgcagaaatttagtatctgtgcactgaaaaagaaccgtaaagaggttctggaacttttgcaggctgccggcgtggtggaggtcactcaggaagcggaggaggacggtgtattcaggaagacggataccgtttcttcaaggcagatgtttgacaggaatgcggcccttgcggatcaggctcttgagatactgcaggaatatgttcctgagaagagcggcatgttttccgcgctggagggaaaggctctgacagaccgtgagaaattcggaaaagtcgccgataatgcccagacggtcctggaggacgcaaggcagattcagacactgaataagcaggtcgcggagcagaaagcgggcatagccaagctggaaacacagatagaaggcatgacgccatggctggggctggatatcccgctgggatgtcaggagacacggagcacttctgttctggtaggagccgtagccggcggtgcgacgctggagcagctttatctggcggtcgcggaaaaggcgccggagcttcagaacctggatatccaggtggtaggagctgacaaggatcaaacctgcatagcggccatctgcctgaaaagggatgcggaacagcttgaggatgctctgagagcggcaggattcgcaaggccgtcccaaacggtcggagaggttcccgcgcagtatgtggaagagctgcgggcacagattgaaaaactgaataaagatattgaaaatacgattaataaactgaaggtatatgagggaagcagagagaacctgaaacttctgtctgattattaccgtatcagggctcagaaatatgaggtactgggacaggtggttcagtcagaaaagacatttattgttacgggctatgtgccgaaacggagtgtgaaaaagctggaggagagtctcacgtcacgtttcgacctgtcctttgagacggaggacgtcccggaggatgaagaggctccggtgcttttgtccaacggccattttgcttccgcagcagatgggattaccgcctccttcggtcttccggccaaaggagagattgatccgacgacgattatgtcggcctgctacgtattcctgttcggcctgatgctttcagacgcagcgtacggtctgattgtgttcctggcctgctttatcgctataaagaagttcccgagaatgggagaaaacctgaagaagtcgctgcggctgtttatgtactgcggactttccactctgttctggggtgtgctgttcggaggttatttcggagatgcggtaaatattatcagcaaaaccttctttggccgcgaggtttcgatcccggcgctctggttcgtaccgttaaacgacccgatgaagatgctgatatgctccatgatattcggagttatccatctgttccttggcttaggcatcaagggatatatgtatctgaagaataaagacaccctcggctttgtctgtgacgtggtgctgtggtacatgatgctgattggcctggtgctgattctgcttccgacagagctgttcggttccatcgcgcaggtacagattgtattcccgcccgctgtctccatgctggcaaaatggatggcaatcatcggtgcggtcggaattctgtgcatgtcggccagaaccacgaagaacccggtgctcaggctggcgctcggcgcttatgatttgtacaatatatccggctggctgtcagacgtgctttcctattcgcgtctgctggcgctgggactggcgacaggcgttatcgcctcggtagtgaaccagatgggcagcatgttcggggaggccccgtcggcgctgttttattcattatcattttctgctttggccatctgttcaacctggcaatcaacctgctgggcgcgtatgtccatacatgccgtctccagtacgtggaatttttcggtaagttctatgagggcggaggaagagaattctcgccatttaaacaaaatacgaaatatgtagatatcaaggaggatttataatatgagcggtatagtttttgcattattaggtgtagcggtagcagttggtctggccggtatgggttctgcctggggcgttggtattgcaggccaggcggcggcaggcgttgtaacggaggatcccggtaaatttgcgaaggttcttgtgcttcagcttcttccgggtacacagggtatctacggacttctggttggtttcatcacattgtctaaaatcggtcttttaggcggaggcgttaacatggatatgagcatgactcagggccttctttactttgcggcctgtattccgattggtattgtgggacttatctccgcaagatatcagggcgagacagcggcagcttccattggcatcgtggcaaagaaaccggatcagttcggtaaagcgatgctgttcccggccatggttgagacatacgcaattcttgcgctgttaatctccatcctggcagtaagcgccctgtaatcattgacctatcagttcagccacattgataaccattaaatttaaggagaatttggaatgaccggattagacaaaatcataagtcaaatccttgaagatgcaggcaaagaagctcaggagatttccgagaaggcaaaaagcgaggctgaggcggttctggccgaggcaaaagcgggttgtaaaaagatagcggcagagaatgatgagaagctggccggagaggccacaagctatatggaacgcatcaaatcctccgcagagcttaaaaaacgccaggccgtacttcttgcaaagcagcaggtaattacagagatgctggaacaggcatacgaggcgctgcttaagaaggagggcgaagagtattttgccctgattggaaaaatgcttgataaatatgtcctgcccaagacgggcgagatttatttttcagaaaaagacctggacaggatgccgcagggatttgaggccgtaattgagaaagcggctgtttcaaagggcggaagcctgactcttgtaaaagagccgaagaacatagacggcggttttatccttgtctatgggggaatcgaggaaaactgttcattccgggcgctgcttgcggccaggagggatgaactttccgataaggtacatgcaatgttattttcataatgtgtaaccgacaaggaggattatatgtctgatacaaaatatgcctatgcggttgcacgaatccgtgcgatggaactgtctttgttttcctcctccacactggatcagcttatggccctgaagacgtatgagagctgtcttcagtttctgacagagaagggctgggggaccaggacacgggaatggacgcggaagcgatcctgaccagggagaaggaaaaaacatggaatgtggtcagagaccttttaaaaaaggaggatgcggggattatcaatgtcctgtcctacgaaaatctcttccacaacctgaaggcggcaatcaaggaaacggtcacttccgatcatcacgggaacatctattttgataactgcgcaattggcggcaaagagatggcccggattgttgcggaacgcgactggcaggcgctcccggccaatatgagggcggctgcggaggaagcctacgagacattcctgcacacaagggacggacagctctgcgatatcatcgtagacagggcggcgctggaagcaatttatgcggagggggaaaaagccgcggacccggtaatcagggcgtacgcggaatcaaccgtagcggttgccgatatcaagattgccgtccgttcacagaaaaccgcaaaatcactggaatttattaaacgggcgatggctccctgtgccagtctgagcgtggaacggttaagttcggcggctctgtccggcatggatgctatctgcgaatatctggaaggtactgcgtatgcaggcggcgccgaggcgcttcgggaatcaccgtcggcctttgaacgctggtgtgacaaccagttgatggaggcaattaagccgcagaagtacaatccgttttcagcaggtccgctggtcgcttatgtactggcgagagaaaatgagattaagacggtcagaattattctgacggccaggctgaatgagcttcctgaggagcagatccgggaaaggataagggaaatgtatgtataaagcagcagtgatgggcgactacgacagtatttacggctttgcggcgctcgggctggatacattttccgtatccggccaggaggatgctgagaaaacgcttcagaagcttgcaggcagtgaatatgcagtcatctatataacagaggctgtggcggcccagaccggccgcgccatagcgaaatataaagaaagcctgcttccttccatcatcctgataccgggtatctccggcaatacgggaaaaggcgtggaaggtgtgaaaaaatcggtagagcaggcggtcggttctgatatcctcttcggagggaaccagtaaggaaccattataggttaagaaaggtgggtgtgaccttccaatgagcaaaggtacgattaaaaaagtggcaggccccctggtaattgcacaggggatgagagatgccaacatgttcgacgtggtccgtgtaagcagccagcgtctgatcggtgagataattgagatgcacggagacgaagcctccgttcaggtatatgaggagacctccggactcggaccgggggaaccggtggaatcgatggaggttccgctgtcggtggaactcgggcctggcctgatcgccagtatttatgacgggatccagagaccgctggatgatatcatgaaggcgaccggaagcaacaacctgaagaggggtgttgaggttccgtccctgaaacgtgataaaaaatgggagtttgttcccgctgtacaggcaggcgacgaggtggaggccggcgatatcctcggaaccgtccaggaaaccgtagtcgtagtccagaaaattatggttccctacggcgtcaaaggtacggtaaaagagattaaaggcggtgaattcaccgttgaggaagcagtggctgtcatcgccacccaggaaggcgacagggagcttacgatgatgcagaaatggccggttcgcaaaggccgtccatatctcaaaaaactgcctccggagactccgcttgtgaccggccagagggttgtggattccttcttcccgattgccaagggcggtgtggccgccgtgccgggccccttcggaagcggtaaaaccgttatccagcaccagcttgcaaaatgggcggaggcggatatcgtcgtttatatcggctgcggtgagcgtggaaacgagatgaccgacgttttaaatgagtttccggaactgaaagatccaaagacgggatactcgctgatggagcgtaccgtcctgattgcaaatacctccgatatgccggttgcggcacgtgaggcatcaatttatacaggtatcacgattgcagagtatttccgtgatatgggttattcggtggccctgatggcggactccacatccaggtgggccgaggcgctccgtgagatgtccggacgtctggaggagatgcccggtgaggaaggttatcccgcttatctgggaagccgtctggctcagttctatgagcgtgccggtcatgtggtttgtctcggcaaagacggcagggaaggcgccctgtccgctatcggagccgtatcccctcccggcggcgatatctccgagccggtgtcccaggccacactccgtatcgtaaaggtattctggggactggattcctccctggcggcaaaacgtcatttcccggccatcaactggctgaccagctactccctgtatgtggacagcatgggcaaatggtttgacgagcatgttgccgatgagtggatgcagagccgccagaagatgatgagcctgctgcaggaggaatcggagctggatgagattgttaagatggtcggtatggacgcactttcaccttccgacaggctgaagatggaagctgcccgctccatccgtgaggatttcctgcaccagaactcgttccatgagattgacacctatacctccctgcgcaaacagttcctgatgatgaagctggttctggctttctatgaggaatcccagaaagcgctgaatgacggagcttcgtcgggcgggctgattaaaatggcggtcagggagcggatcggccgtttcaaatatacgacggaagataagatagagacagaatatcaggcggttttggagcagcttgcaaaagaaattgccgatgtattaggaaaggaggacttctaaatgccaaaagagtacagaaccatacaggaagtagccggtcctctgatgctggtgcgcggcgttgagaatgtaacgtatgatgaactgggagagatagagctggccagcggagagacgaggcggtgcaaggtccttgagatcaacggcagcgacgcccttgtccagttgtttgagaactcaaccggtatcaacctttcaaacagtaaagtccgcttcctcggaagaacgatggaactgggcgtttcggaagacatgctgggccgtgtattcgacggtctgggccggccgattgacggcggtcctgagattcttccggacgagagaagagatattaacggcctgccgatgaacccggcggccagaagttacccggaggaatttatccagaccggtatctcggccattgacggactgaacaccctggtccgcggccagaagctgcctatcttctcggcatccggccttccccatgccaacctggcggcacagatcgcaaggcaggccagggtccgcggcaccgacgaaaatttcgccgtagtatttgccgccatgggtatcaccttcgaggaatccaacttctttatcgaaagctttaaagagacgggggcaattgacagaaccgtgcttttcgtcaacctggctaacgaccctgccgtagagcgtatcgcgacgccgcgtatggcgctgacggccgccgagtacctggcttttgagaaagacatgcacgtactcgtaatcctgaccgatatcaccaactatgcagacgctctgcgtgaggtttccgcagcccgtaaagaggttcccggacgccgtggatatcccggctacatgtacaccgatcttgcctccctctatgagagagcaggacgccagaagggcaaatcaggttccattacgatgatcccgatcctgaccatgccggaggatgacaagacccacccgatccctgaccttaccggatatatcacggagggccagattatcctgagccgtgagctttacagaaaaggcattacgccgccaatcgacgtacttccttccctgtcgcgtctgaaggataaaggtatcggcgaaggcaagacgagagccgatcactccaatacgatgaaccagctgtttgccgcatacgcaagaggtaaagaggcaaaagagctgatggtaatcctgggtgaggcggcgctgtccgatatcgacctgatttatgctaaatttgcggatgcctttgagaaagaatacgtttcccaggggtatgaggcaaaccgcgatatagaagagacactgaagatcggctggaagcttctttccattctgcccagggcagagctgaaacgtatcgacgacaaatatctggatctttattacgggaaataatgaaaagaggtgattgccgtggcatcaacacaggtgaacccgaccagaatggagctgacaaggctcaagaaaaaactggtgacggccacaagaggccataagcttctgaaagataagcgggatgagctgatgcggcagttcctggatctggcgagggagaacatggccctgcgtctgaaggtggaagaaggaatccgcagcgccaataagaacttcgtcattgcgaaggcgggaatgtccgagcaggcgctgaatgcggcgctgattgcaccgaagcaggaggtatatctggaaacgggaaagaagaatgtcatgagtgtcgatatcccggtttttgaatataggaccaggactgcggatgagaatgatatttattcctatggatttgcatttacctccggcgatttggacggcgcggttaagtccctggcagacattctgccggatatgctgaagctgtcggagacggagaaggcctgccagcttatggctgccgagattgagaagaccaggaggcgtgtaaacgccctggagcatgtaatcattccggagacgaagaagaatatcaagtatatcacgatgaagctggatgagaacgagagaagcacccagatccgcctgatgaaggtgaaggatatgatgcttgaagaagctcatcattacaaagaaaaacagtcaatggctgtagaataaaatggaagtacagatgtagggcggcagctgcctgggatcctgacgggatccgggcggctgccgctttttgtgtactttttttacattgcggacaaaactgttggaggactaaaagctgcaattaagggacataaatgagaaaagaaatgagatatatgataaaattattagcaagttaacagataaaataggcgcaaagtcttaaatttaaatactattaacaagagtaaaaatactcaaattatgagtttttaatagatatgcaagcaaatgcggcatcagggaatctggcagcttcagcgccccggcgaagacagagaattcagttgtgtaagcagtaacgataatatttaccaggaggaaaaaagtatgaaagaaaacaaaagaaaagtgaaaaaacgttaccgtcaaaaggccagacaatttatcagcggtcttcttataaccgccatgctggcgccaaacatgacgccgattatagcgcaggcggcggagctgatagagaatcagccgcgttatgtggactttacaaggcctcaggccctgacgctgagggaattagggattgaatccggagtgtccgatacctctgatggtgaccgcgcagataggacagaaaatagtgcggaaccggataaagacagtgacactggaaaagacagtgaatccggtaaaagcagcgagcctggaaaagataatgaaaccggaaaggacagcggaaccgggaaggaagatgagcctggaagagacagtgaacccggaaaggaagacgagcctggaaaggacagcggaaccgggaaggaagacgagcctggacaggacaacgaagccgggaaggaagacgagcctggaaaggacagcgaagccgggaaggaagacgagcctggaaaggacagcgaagccgggaaggaagacgagcctggaaaagacagtgaagccgggaaggaagacgagcctggaaaggacagcgaagccgggaaggaagacgagcctggaaaagacagtgaacccgggaaggaagatgagcctgcacaggacagcggagccggttcggagaacggagcggagacaaagccgggaggttcggccgatggaggtaatccggccgataatccggcggcaggtccggccgaaggattaccggaagaggatgcaaaagaagagatacccggtgagataccggtgacggatgaaggactgcgccttcctgaagagctttatcaggaggtgactgaagagccgtccggcgtgctggtacagttttccgatctctgccgcacataccagaccggggacagggaatacgtaaccgtaattggcggatattccggcctgtaccgtgacaaggacggtaaagtacggccgattgacaatactctggtcaaaggcgattctgccgctgtcgaagcagacggggaagaagcgacaccgtccaacgcctctttcttgcggagcaaggctgcctcatgggtggaaaatgaagccggtcctgtaaagatacggattccgcttaagatgagtaccagccggggcgtttccatagagacggaaggcggaaagattgaactgattccgtctgccggaaactttaaagagccgtcggtggccggaaatgcaatccggtttaatgatgtatttgagaatgtagattaccagtatacagtcattgagaatacggtgaaaggtgatatctttcttctggagaagggggacaggtatgagttctcctataaactcaagataccgggaatgactgcgaagcaggaaaaagataaaatttccatttacgggaaggacacggcgaaagccctgtttcagttggacgctccgttcatggaggatgattccggcgagagaagtgataaggtcaaactgaaactttccggaacgaaggggaattatacagtcaccattaaggcagataagaagtggctgaatgatgaagagcggtcctatccggtacgcattgatccggatacctacgttccctcggatgaatttatttttgcgacgatatcacagggacagccggacacgatttatgattgggacagcccggcctatgtcggatatctggacggcagccggaagaactgccgggtatgtgtgatttttaatgaaaataattcagataccatatcaaagcttctgtcgggagcggagcaggttcacaatgcgaccctgaaggtcacgacagagacggataacagcggcggtcagaatataatcgagctgcatgtgcctgtcactcaatggaacggttatattacaagctggaacacccagccggactataatccaagttcagacagagtctggcagactccggcgcccggcgcagggcagacgatggaatttgacatcacggatctggtcaacggatggatcaccgtgacagagccgccattgggactgatgttccggtcggaaattgaggcggacggcggcgcgtatgccatgaaggcggaagtgctgtgcaacagaggggattcggttaacggcccccggctggaatattcatggacaggcgatctggaaggcgatcttgccaatatgagcgtggatgacacgacgatagaagtggatccggccgtaatctacacagatatattcggacgcagcgtaaccggcgtgatcgcccacggtaaggcgcaggccggttcggaggtcacctaccggcttctggaggaaggcggcggcgacgtaacggacgcaatggaatcacttgtatatcctgattttcggaaggccggactggaagatgacttcgatttgtctcctgaatcaaactggcagacggacgggtttgaagcggaaggcagcctggaatatgacaccatttactattttgaagcctttgccacaggaaaagaagtcggagaagacggttccggtgaggaggagccggacggagataatacggttgtaggagcaacggttacatcggatcagtttctgctttatgaggtgaaggagcatgatttgagtaccaggattgcccgccactatggcattaatgtaggccagcttgcgcgtgataataaactatataaggatcaattgactgagaaagataccattttatttatcagaaaccctaagacggcggagccttataatgcgtataaggatatgacgccgttggaagaactgcttctgcgcaaccttctggcaggcataaatccgaactgcgaactgaacctggaaccggtcaatatgaataccggagacttcttcatgcagcagaccgatgcatccatgaaagaattgaatggagaattcggagtcatgaggagctataactccacgctcccggattaccaccaggaatttggctatggatggacatcggaattcggcgaccacctgactatattaaaggatggaaccattctctataagagaagcgatggaaagggaatcccatttaccaggaacggggatgtgtaccaggctcccgacggctgggatattactcttgagcctcttgatgccatagaagtgcgaagggcgtctgcatccgaggcagaagaagaggagccaaaagagagggaagcggggacacgcaccgtaaccacaaaagatctggatgataaggcacagctgaaccgccggaggggtgagatccgctttggtttcctgaaagcgacctcctcggaggcagagcggacgccaatcccggactgcgccggatggcagcttacgaaccaggacggcagccgctatgtatttgacgcgttaggacttctccagtaccgggaggatatgaagggacgcagaacctggtaccggtacgacgaggattataagcttctccaggcagagtctcccacaggcaggatacttgatatcacaatggatgacgcgtaccgcatcacggacattacgctgcctgacggcaataccctccgttacgaatacgatgaggaaggcaatctgatcagcgtcaccaatccggagggagatatacgccgttatgaatacgatgagaaacaccggatgacggcctggtacgacgaggaagggaaccgcgtggtggaaaatgtatacgacagtgagaaccggattacggcccagacggacgcaaacggaaatacttcgtatctttcctattcagacggagcgacggtactgaccgacaaccgcggttttgtgacccgctatgagtatgacggcagttacagaaccacgaaaatcacgtatccggacggagcagcacgtacgaagatctaccgtgacggccgcgtcgcccaggagacagacgaggagggcaatacaacctcctatacctatgacgcggacggaaatatactgactgtcacaagagcggacggagcaagggcggagtatgcttataatgcgatgaatctgccgctggccgcagaagactttgaggggaacagaacggtctttacatacgatgaaaaaggcaatctcctgacgaggacaagcggggaggggaatacctggcgctatgcctatgatgagctgagccgtctggtgtccgtcacggacgcaaacggccaaacgacggaattttcctacgacggggcggttgtcacgcagatgaaggacgcggaaggatacatctggcgctatgattatgacaggatgaaccgtatgctctccatggtggatccgcttgggaacgcagagatctatacctataaccgcaatggatggaaaatcaatgagacggcgaaggacggcgggacaactgagtatgaatacagcccggcgggcgccgtattgtccatcaccgatccggcgggggcgaaaactgtatttacttacgataagatgtaccatatcctgacgggagaagatgctcttgggcataccctcacctacggatacgataagaactataaccggattgtggagacagatgcgaaaggaaatgagacatggtaccggtatgatgagcggaaccgccgcaccgctgttaccgatgcaatgggacgcgccgtaatgcagacgtttaacggcaacggcaacctgacatcctcgacagaccggaggggaaatacagtttcctggagttataacacgatactgaaccttccggaatccgccacggacagcctggggaacaggaccgcctattcctacgataagaacgggcagacgaccgccgttacctacgcagacggaagcggcatttcatatgcctacgaccgcgatggcagagtaatccgcatgacggcgaaaaacggccttgtcacagagattacttatgacggcaacggaaatattattgcggtaagcgatgacgggacgagagtctatcatttcacctatgaccgtaataaccgcctggttaagacggaagatccccagggcggaactgctgtatacacctatgacggggccgggaacctcaaaggccggaccaacgaagaaggccatgagacaaggtacgcctacgatgcggcaggacggctccaggagataaaggacgctgtcggaggcgccgtatcactcgtttacgatttgaacggtaatgtattaaagacaacggaccagaacggacacagcagcaactaccactacgatgtcctgggagagcttctggcaatcgtaaacgcagagggccatgtgaccggctattcctatgatgaactgggcaatctgaaagaaatgacagatgccttaaaagggcagaccgcttatacctacgatgagctgagccgtacggtcagaatgactgatccgatggggaacccatatctttacgaatacgatgagaatggaaatctgctgacggttaccctgccggacggggatacggtaaccttcacctatgatgctaacaaccaggttacgtcaagcactgatgaagccggcgttgtgacatcctacgaatatgactccatgggccgtatcacccgtgcgtcggatacggcaggcaataccatgacctacgagtacgatatatccggcaacctggtaaaacagacggataccatcgggcggagcgcggtttatgaatatgatcgatttaaccgtctgacggccgttacagggacggatcttgccacgacccgttatgcctacgatacgctggaccgcctgaccggcattacactggcggacaataccgcgacgatctatgaatacgataagactggcaacctgatcaagaccacggaaccgggggaggctgtttatacctacacttatgatgcgatcagccgcctgaccggaaaggtggatcccctcggcgcagccacacggtttgtctatgacccggcgggcaacctgacgggaaccacggatgcggaaggcgcagagagggcctacacctatgacgccgtcaacaggatgatagcggaaagggacggacgcggaagcgtcaccggttacgaatacgacgaattgtcccggttgatctcctacacgacgccggaaggaaataaggaggaataccgttatgacgccgtcggcaatctgactaagtcaaaggacgccaatggactgataaccgagtaccggtacgatgtgacgggcaacctggtagagaagatatcaccgaagggggcaaaaacaggctatacctacgacaaacacgatgaacttttaagcatcactgatccggccggcaatgtgacccggtacgaggtggatttaaaccgcctggtaacaaagatgacgcagaaaaacggcggtacctacacatatacgtacgatccggtacaccgtctgaccggcatcaccacgcctctgggacttaagagggagtttacctacgatgtggcggacaatatcattaccgatacagacagtcttgaccgcagcagcagttatgaatacgacattatgcaccgaatgacgagggccgtggatccggaaggaggcgtgaccgaatacggctacgacatccgtggaaaccagaatgcagtgaccaacgccctgggatatacctggaacttccgctatgacctcgttgaccagcttaccgccagcgtggatccggaaggaaaagcgacggagattgcctacaatctggtcggacgggttaaatccgtcaccaggccgggagaacggaccaccagctaccagtatgataaaaactataacgtgacgggaatcgcagatccgaagggatatctgtaccagtcggtatatgactccgataaccgcagaaccggaaccgtcgatccgctgggacagacgacggaagcggtctacgatccgggcagccgtattacttccgtcaccgacaagatgggcctgactgagaaatatgaatacgatccacacggcaacatactcgccttcacctccacagatggcctgattacccgttttaactatgacattcttgacaatctggtgaaagtgacgatgccgagcggcctgacaacacggtattcctacgacgtgatgggaaatgtaacttccatgaccgacacaatgaagcgtgttacaaaatatacctacgatctggaaggaaacatgctttccctggtgaacgaggaagggcgcagagagcagatgacctatgatgcgggaggcagaaccacttcctaccagacgaacagcggcgacacgatacggtatgactacaaccggctgaatgcgcttgtggaaaaaagctatgagagcggcggggagggaagcgaagcggcagcaggagacttccagaaccaggccgtgcgctatggctatgatgcgctgggacagcgtgtgaccatgatggacgcaacgggggagagcagctatgagtacgactccctcggaaggattacgcaggtaaagaacggttccggacagacgacatcttatgcctatgacggagctgatcagcttgcatccatcacgtatcccgacggaaagacggtatcctacgagtatgataagaatgataatataacaaaagtaacaggacgggacggcggggtgaccacttacgtctacgacgctatcaaccgggttaccgagatacaccggccgaacggagtcagcacttataacagctttaatgcaagggatcagattacatcaatggtaaacaagtgcgacgactgcggctgggtagtgagccagtacgattacacctatgatgaccgtgggttcatcgtgggagagacggcgctggaatccctctacgcctatgcatgggacgacaaacacgacggaaggcatgaggacggccgccatgacgataaatacccccacggaaaccgccataacaacaagcacgacaaagatgcaaaagacaattaccagatcgtagagacgaagcgcagcttccaatacgacgacgatgggaagcttatcaaagccaccgagaaagaagaacagcagggaacctatgtttaccgctactcatatgacgacatgggcaaccggatttcctattccaagacccgtaacgggacggtgcaggagagcgccgaatacagctataatgcgtcaaaccagctcatccgggccaaactctacgacggaaagaaaaacaccacgatgcagtatgagtatgacgccgacgggaacctgatatccgaaatcggtaagaaggggaccgataaggtagagcttcattacacttatacggtggagaaccgtttaaaagcagtccacgacgctcacgagctggtagtggccatggcctatgacggtgacggaaaccgtgtcttccagttaaactacaatctgcatacggatgacgactggaagggaaacagcggaaacggaaatgggaacaataaggataataccgggaacgggaataatggtaacggcaacaaagggaacagcggcagcaacggcgacggcggcaacaacggcaacaaagggaataacggcagcaacgggaacggcagccagggaaatagcggaaatggaaacaaacaaaaagtttcctccgtattagggctgattggcctgtccggcagtgatgaaacggtagatttaagcggacttctgctcggcgaaccggacggaacaacagcggaaaaagatacgaagcctgatgccgcatctgatgaaaatggtgaaaatccgaagtccgaagtcccgctgctggagatgcgcccggaaccggtgcgtgagcttctgccgattataccgtacggcagggacgacacagaaacagaggcagccagcccgtccgaagcttccgcaaattccgaaaagaaaaatgataacggaaataacggcaacaacggaaacggcgggaatggcaaccactatggctgggaagaaggagaatccggtggaaacagcggaggaaacgggaacggcaacgggaataacgggaacggcaacagcggaaatggcaacaatggaaatggcggcggaaataccaataacacgggaggaagcgggaaccagagcggaatcctgatgccgcagaaaccggtatccgacatagagcaaagcctgattgacgagatccggcagaccggccaccacaagaattatgaactgatagaatatgtgaacgacgtgaaccgccaatacgcccaagtgctgatggaagtgaacattgacggggaaatggacacggcttatacttatggtaacgagaggatagccctcgaacgtttcaccggctggaccggatattatacccatgatccaagaggaagcgtaagcggcgtaaccgacagcgggggaagactgtggaagtcctaccgctacggatcgaccggagatatcacctttggaaaaccgcagtacaataacagctatgcgtataatgcggaagattataatccgaatctggaagtacagtacctgcgggcgcgttattatgacgtggagagagggaatttcctgacggaggatacgtaccttggcaagttaaccgacccgctgacgctgaaccggtataattatgtgaagtcgagcgcgccgaattatgtggatccgagtggacataaaaaacaaagctggacagagacagcggatcaggcaaagaaaaactggcaggaatataacaagatgccggttcaggattatgacagcggcccggattacggcagtaagaacaaagaactgcttgaggagttagacaaaaaactcagcactgcccggacaaagctgcaaaaattgatggatgccgcggaagaaaagggaagatctgttatcggatattgctccgactataaggcgggaatggatgcaggaaggaagatagctgaggcggaataccataactgggagctaacgcttctatttggcaaaaatgcgtataagcgggatgactattttggggatactgacttgcaggaaatttatgaccaggcaagaaatgcatccaataataaagacgcatttagcgcaggatttacggccggtcaaacaatgtttacgatagaaatactatcgctgatagtgggagcgttagaaagcggcggctcctcatcaggaggccagcaggttgtactgccgggagtcggagaggtgacaataccgggagatgcagcgggttcagtggctggggtattgccgccaggtagtatcttgagggatcaggagaataaaaaagaatcggaggaggaaggtaagggggattctaactgggataagcaagatgtcaatttaaatgatgtcgatccgaataatttgccagaggggtggtcaaaaacggaaaacaatggacatatccacattcgtgacaataatggtcgaataagagtggaaatcgatccaccagactggagaacagattataagcataaacattattatggatccaatggaacccagttagacgtaaacggaaatcctgttgcacataaaagtccagatgcgcatataccatttggttcataaaaaagaagaatagggagaggaataaaatggatatagacaaaataaaaacattaataagccaatacgactattacgattctttggtcacggaattgacgtgcaattacttttccgacgaagttaaacttatctttgataccgatgagaagaaagatatcgtttatatttttaaggggtgttataaagtgctttttgatcacgcgaaagactatcaaaaaccagatgaaatcaaaagaatcggtttaaaagaaatgttttatcatcttgtggagcttaaggtaaatatcagtgataataaaaaattttattgttgcgagattgatatgtggccacttaagttagagataatgtgtaaagatattgagatacttattagtggttaaaagtttgtaatgacgttcgcccggctttgccgggcgatgtccccagaggttatgcgttatccagcataacctctttaacctgcacacttttcgaccctgattatattggctgatttgggtagaagtgcctctgttccacattggctcaacaaatcagaacacttgcttcatggtatatctttccgagcaggggcttaaaaccggcacgcaggctgtcacggtgcgtcacagggctaagagatggcgggcaggagccacttgttggcataggattgggatatccaccctgttttgcacggaaaagccgggaatccgttgaatattgtggttgaatcaaaggattcccctgccagaagccggaaaacgccttaaaaccgttgtttttggtgaaatcagctttggctcgtggcataagtttttctgaaatgcaggaaaaaagtattcaaaaaacaagggcatccagcataataaatccgggatttttcacccagcagttttttcatactcagcggtggtttagaagcactgggggcagaatacggaatatcggaaaacctggatgccgccacgccacctatgtaagaaatgtttgaccttctgaaattcatggcaagtaagttttcggtaagaaaaacgcaagagaatcgaaattgacagtcacccagccgctatgttacaatggcgcacacccggggcttaagggggtggaaacacaccggaaaaatcccagcaagacaaacacatcggctgctccatgatggatctggtcggtgtgttttttctgctgttacagaccgttgataaatttcacagctcgggcttcgtcagtcaagctgcaaacctgtcatccattcttctgtcagctacttcatatattttttcagcttgtgaggaagtcgataccacaatggaacaaatatctgctccatagatgaagcaccttacacaaatcgaaaaaagagccgggaaaggacttgaatccacctgtccccagaggtaacatacgacacacttccagataagaaaaatgataacggaaataacggcaacaacggaaacggcgggaatggcaaccactatggctgggaagaaggagaatccggtggaaacaacggaggaagcggaaatcagagcggaatcctgatgccgcagaaaccggtatccgacatagagcaaagcctgattgacgagatccggcagaccggccaccacaagaattatgaactgatagaatatgtgaacgacgtgaaccgccaatatgtccaggtactgatggaagtgaacattgacggggaaatggacacggcttatacttatggtaacgagagaatagcccttgaacgtttcaccggctggaccggatattatacccatgatccaagaggaagcgtaagcggcgtaaccgacagcgagggaagactgtggaagtcctaccgctacggaccgaccggagatatcacctttggaaaaccgcagtacaataacagctatgcgtataatgcggaagattataatccgaatctggaagtacagtacctgcgggcgcgttattatgacgtggagagagggaatttcctgacggaggatacgtaccttggcaagttaaccgacccgctgacactgaaccggtataattatgtgaagtcgagcgcgccgaattatgtggatccgagtggatatgacagccggggatattcgaacacggccagcggaagagagcccggtaaacgtcccggttctatttatgacggatatgatgaatcgataagagcagaggtcaggaaagaacataaggaccgtatagcagccggtttgagtaaagctcagaaaagattgtatgatgcgataaccaaggcattggatggtgtcaataacagcagtgcagtttatattaagcttggggcacttacaattatggcagaagcggacagtgaagtagatgattgtgcaaaagagaagatgacagaagcgatcatcagtacactggcagggatgctgagtgaaatggcatactatggaagaacaagtgtcgaatggaatgggattgtgcaagccctgatagagtggggaattgagaacaaagaagaggagatggtagagaaatattttaatgcacaatactattacacgggaaaagcattatttgatgattggtatgcagaggtaggaagattaaccaccctgacctcattaataacttcaatagcaggctttctgggcggaggtggctccttctccgtaggaacagcggcaagcggctcagcagccctggcggcatcgggaactgcagtagtggcaggagcttcagcagtgacggtaggaatagtggtggccggtgttggagtaaatggcataatcatggagtccagaggtgaggcaagggggaagcgaatcgagaaaagagtgagggggaagctgattcttgggaaagaaatttaaaggatacgagcgaactaaacagttctgatttcgacaatttaacagacaaaggaactgttaaagtcaatcaggcaggttcagatagaccgcctacaaatgatccgaacagctttctcagaacggagaatggagagcatgtatttgtatatgatgataatggagatttgatttatgatataagctctagtagagtaaaaggatttaaaattaatactaaccctgcaggtaaaaagtttttaagtccttataaattagatggcccggtaccacagtttattttagatctttttggatggtgataaaatgtatgaaataagatattgcaatagcattgtaaaacaaggaataatgaaaaagtttagagagcctaaaggattaaatttatttgaacatgcatgtaattgtaattcattagaagatattattgcgatttcatatttgttatgccctgattttattcagataggagaatatatttttgtttctgtttttttcgaagaagaaggtgaggaggctataaaaaaagtcaagaaattagaagaacgatttggtaagaacaaaaaacttatagaacaatgggttaatagctggagtatcggagatttattcataaattgtacagacgaatcttatcaaaataattcgttaataatgcagttctgtgacatcttagtttataattggcaacaaagattgaaagaattgtttccacacaaaaaaattatagtagaaactgggaacgagataatgggagaactggggttgactattacggtttatgagcagtagttaatgtaatattaattttaactatgattattcgcccggctttgccgggcgatgtccccagaggttatgcgttttccagcataacctctttaacctgcacacttttcgaccctggccatattggctgatttggggagaaatgcctctgttccacattggctcaacgagccagaatacgtgcttcatggtatatctttctgagcagtgtcttaaaaccgacacaccggccgtcacgatacgtaacaggtctaagagatggcgggccggagccacttgttggcataggagtgggatgttcactctgttttgcatgaaaaagctgggaattcgctgaatattgtggttgaatcaaagtattccccctgccaaaagccggaaaacgtataaaagcggcacacgggcggtcacggtgcgtaacaggggtaagagaaacggatatatggacagccactgtgtattagatgttaccggctcaaaaaatacattttccttcaagccacctgtcaaaggccggttttctgcggtgattaagctgtttgggtgccaaaacctcagaaaacagaaaagccgggtgccgccaagccacccacagattgcctcaaatattattttcgaccctgacctccagtaaggattcagtaagaaaaacgcaagagaattgaaattgacggatgatatatgttcatggtgcaatggcgcacactcggggggtaagggggaggaaacacatttgtttccagaccaaaaaacgtttaacaacagacacaaaacacagccgctgaatcctgcattggagttcaatggctgtggtctttttctggtgataatctcttacagatttcctgtaaacttcatgacccagatgccatctttgaatccgcccacgtatagataaggttcttcttctgccatctgttccaccagatgttcaaggtactggttcagggtatcccggtcagcatcaggcagatgctttaaaatcacttcgcctgctcaatcacctgtgatacatgatttctttccgcgcagtgtcttaaaaacattggttttggtgaaattagctttggctggtggtataagtttatctgaaatgcaggaaaaaaatattcaaataacaagggcatccagcataacaaattttggctttaccacacggtagttttagaggcgttaggtagcagaatacggaacaaaagtattcaaaaaacaggggtatccagcataacaagtttgggctttttcacccagcagttttttcattctcagcggtggtttagaagcactgggggcagaatacggaatatcggaaaacctggatgccgccacgccacctatgtaagaaatgtttgaccttctgaaattcatggcaagtaagttttcggtaagaaaaacgcaagggaatcgaaattggcagtccccctgatgctatgttacaatggcgcacacccgggggcttaaggggggaaacacaccggaaaaatcccagcaagacaaacacatcggctgctccatgatgaagctggtcggtgtgttttctttctgctgttataggcagtttataaattccatggcccagatgccgtctttcatgccgcagatccgtcatttattcttcctccgccatccacttcataatctcttcagcttgtgcggaaaccgataccacaatggaacaaatatctgctccatagatgaagcaccttacacaaatcgaaaaaagagccgggaaaggactttaattcacctgtccccagaggtaacatacgacacacttccagagtggtctctctccggaaggaataacctaagcttcttccgattataccatacggcggggacgacacagaaacagaggcagccagcccgcccgaagcatccgcaaaatccgaaaagaaaaatgataacggagataacggtaacaacggaaacggcaacaatggaaatggcggcggaaataccaataacacgggaggaagcggaaaccagagcggaatcctgatgccgcagaaaccggtatccgacatagagcaaagcctgattgacgagatccggcagaccggccaccacaagaattatgaactgatagaatatgtgaacgacgtgaaccgccaatacgcccaggtgctgatggaagtgaacattgacggggaaatggacacggcttatacttatgataatgagaggttagcccttgaacgtttcaccggctggaccggatattatacccatgatccaagaggaagcgtaagcggcgtaaccgacagcggggaagactgtggaagtcctaccgctacggaccgaccggagatatcacctttggaaaaccgcagtacaataacagctatgcgtataatgcggaagattataatccgaatctggaagtacagtacctgcgggcgcgttattatgacgtggagagagggaatttcctgacggaggatacgtaccttggcaagttaaccgacccgctgacgctgaaccggtataattatgtgaagtcgagcgcgccgaattatgtggatccgagtggacataaaaaacaaagctggacagagacagcggatcaggcaaagaaaaactggcaggaatataacaagatgccggttcaggattatgacagcggcccggattacggcagtaagaacaaagaactgcttgaggaattggacaaaaagctcagcactgcccggacaaagctgcaaaaattgatggatgccgcggaagaaaagggaagatctgttatcggatattgttccgactataaggcgggaatggatgcaggaagaaagatagcagaggcggaataccataactgggagctaacgcttctatttggcaaaaatgcgtataaacgggatgactatttttgggataccgacttgcaggaaatttatgaccaggcaagaaatgcatccaataataaagacgcatttagcgcaggatttacggccggtcaaacaatgtttacgatagaaatactatcgctgatagtgggagcattagaaagcggcggctcctcatcaggaggccagcaggtggtactgccgggagtcggagaggtaacaataccgggagatgcagcgggttcagtggctggggtattgccgccaggtagtatcttgagggatcaggagaataaaaaagaatcggaggaggaaggtaagggggattctaatactcaaagaaatggtgtccctgtaaaagaaaaaactaaggcatcaaatggattagattaccaatcaaatcccaagcacactccaggccaacctggcaatagacctaatgctggaatagaacctaaaaattccttggatttatttggagaatcagttccttctacatcaaagccaaatcaaaggtttacttatgatgcggaaactagcacgctacatcgtttttacaatgatggaaatggcacatggcattggagtggttctacgaatcaaggagcaaattctattacagggagtcaggttccaaatgatataaaaaatatatttggcttacccaaaaaaggatggtagttatgatattagggaatccatataagttttcagtatttattagcacaataaaagaatggaatatagataatgaattttgtaatggagttttgctcttttgcattgatggaaacatctttcctaaaaaaattgttactgcgactcttaaatgtgagattcagttattaaaagaaaaattgaggaatcttattactaatgaaaggttatataatatgcaaagagataaagcctttgccgaaatatataatatcacatttccggaggatataagcattgacaatgattaccgctttgatataacgccagagtcatttgcggatgaaaactgttatgtttttgcagttagtaatggaaaagaagtacgcattatggcaacgaagctgaattacattgtggaagagtcgagacatgaacttagtaatgtagatataagcgaaacatttattgaaattgaagatttaaaccaaataatatcgcaattagagatctgctaattatttgcaatgagattaaagacattcgcccagctttgccgagcgatgccctcagaagttatgcgttttccagcataacctctttaacctgcacacttttcgaccctggacatattggctgatttggggagaaatgcctctgttccacattggctcaacgagccagaatacgtgcttcatggtatatctttccgagcagtgtcttaaaaccgacacaccggccgtcacggtacgtaacaggtctaagagatggcgggccggagccacttgttggcataggattgggatgttcactctgttttgcatgaaaaagctgggaatccgctgaacattgtggttgaatcaaagtattcccctgccaaaagccggaaaacgccttaaaaccattggttttggtgaaatcagctttggctggtggtataagtttatatgaaataccagaaaaagttattcaaaaaacagaggcctccagcataacaaatttgggctttaccacacggcagttttctcattttcagcggtagttttagaggcgttgggtggcagaatacggaacactggaaaaactgggtaccgccgagccacccacgtaagacacgttcgaccctttaaaattcatggcaagtaagtttccagtaagaaaaacgcaagggaatcgaaattgacagtcacccagccgctatgttacaatggcgcaccccgggggtttaagggggtggaaacacaccggaaaaatctcagcaagataaaaacaccggccactccatgatggagctggtcggtgttttttctttctgctgttataggcagtttataaatttcatggcccagatgccgtctttcatggtgcagatccgtcattcattcttcctccgccatccgcttcataatctcttcagcttgtgcggaaaccgataccacaatggaacaaatatctgctccatagatgaagcaccttacacaaatcgaaaaaagagccgggaaaggacttgaatccatctgtccccaaatgcccagagaaaaagcgtacccatgtattaaaaaagcgacagctatgatgcagaagcggttgctctggtgctgatcaatatgttggataagctgccggacgctataccggatgataagtattggacgctgggccagttagtaaaccggcgggataatatctgtacccatctgcacaggctgaagaaccagctccatgaacagctctgtatggcgtatcccagctataaacagttctttagactttctgtcgggtggcatcaagccatctgatatttaccctgcacgcttttcaacacggattgtttataccaattttagtaaagcgattgtatacattgccctattagctccgataactgtttcattgtaattttttgaggtgtaatacggcgcatgggggtctcggcgtgtcataggggaaagagaaataactatttaggcagtcactgtgtatgtgatatttccttgtctcaaaactcattaaagggaagaaccattattggattttgttctgacagtaaggttggaacggatgcgggaagacatttaggagattagtatgaataaagaatatgtggaagagtttattgaccagatagaaaaaataatgaaagtaagcggtgaggaagaatatgttcaagatgaggcaggagtatatttaaagataccatatttaaaaaatctaattttagaggctagaagattgattaaatatggagaatataaaatcgccttagaaaatactttggagaatctatatgaagtatcaatttcgttagataaaacaacaatggttctagtttaccaagcatttgacaataagatttgcacatatatggaggggcttctaagcgaccttacaaaattctgatgattatatgcccggctttgccgggcgatgtcccaagaggaatcccttttttaggcaacgttggaatcaggaacggaagtaagttctaaaattatatcatattagataaagaaagatgacataacaccagccctttttatttgtccatgataaaataaaaccggaaacatactcagcatagaatctatcaggaagacaattgccggatgataggcaggctgaaagaagaggttagacatctctgctatgaactatatcatacaagggggaatcggtatgtacaaaattgccatttgcgatgattgccgtgaggcgctcagggagatagaaaagctgcttcggagatacattgaaaagaataaaatcagggctgttgtggaggcttaccagagccagatgcagctgttgacggaactggaaagtgggaggtattatgatataatatttatggatattaagatgccgggaatgaacggccttgaagtcctgaaaagaatacgggaaatgaattcggacagtctgtttataatcatttcctcataccatcaatatgcggtcgtcggttatgaattggatgtattccggtatttggtgaagggggacttggaagccggctttgatcactgcatggaagccgccttaaaaaagattaattctgataatcaaaaacattattttattacttctgcgcgtaagcgaatcaaaattccgtgtaaggatatcatgtattgtcataaagagtcaaaaatgtccgtgttcgtgacaaattcaggggaactaatcagagaaagaagagcccttcaggaggtatatgaaggtctgcagcggatagacgacagctttataatggtagaacgttcttatttggtcaatatgcattatattgaaacgatgagacagaatgagctattgcttgaaaataatataatcttaccagttggacgcacctatgtggatgatgtcaggaaaacgctgacggatttttggagaaaaaggatatagcttctgtttctggcgcgggagcggcatcaatcgtggcaggctgtgagccggagattccggaattattggtacaaaataagatttttaagaaggggaccggcacgtgactgtggcgtcccctttctctcataatgcacagaggcaggaagtgatgtgaaaaatcggaataaaaggggagctgtttttttgccgcccaatatgatatgataagactgtttcatgatacttacggtgtaatacatatgggggatgttatgaaaatccgggtcaggtattttaataaaaagaagtttatatccggctgcatcctgctgattcttgggatatgcatgccgttttttctaaccataaatatgtgggaaattccggaaaaagcatatgacgcaattgtcacacgggataagctggaattgtggacagcgggaatgaagctgggagcgcttaattcgatccgggcctttccccattatttcggggcgtttatcattgccgagtctattgaggtggacagcgatcataagattaccaaatggctgaaatcaggaatcgtcttttgtattattccaatcatttataccatcatcagcaatgtccaccagattaaatatgattttggcatacctgccctgtcattaattattctgctgattctgctgggaaagaatgattacaattacgtgagcctgtggaagaaagccatgctgattctggtgtttttgtctgcgcttcagtttctcgatatcatgccctgcttaaagggactgcctaccggcagaggggagatgtcgagggatatcaaactgatagccgaatttctggagatggagccggagatgaacggtacggtggcgatctttttcgcgctgcttatgtttatggggatccttctgttcctgctcatccgggatgagaataacctgaaggccatgaatgagctgaaagcgcagaatgagaggatgattatggacacaaggctccgggtgctggaaaaccgcacatatctggaaatgagacatctggtccatgatttgaagtcgcctctgacctcggcccaggcgctggtcggggtggtgcggatgacctgcgataaaaaggagatggacaaggagtcgggatatttaagccaggtggaatcgtcgattgagaagatgagcagcatgatatcggaaattctctatgagaaccaccggacccggatttcgacggaggaaatacttgattcagttctggcccagatttcagtttccgaatattcggagctggtacatgtccataaccaggtgccggagaaatatatacatgtgaataaaatacggttttcaagagcgctgattaacctgattgagaattctttttatgccctggcggagcagggggaaggattgatttggatgtcagcaccgttatttccgaagaggaagaatcggtctgttttaatatatcagacaatggaaagggaattgacggagacacgctgtcgcttatctgggaacggggattttccacccgcagctcccatggtctgggactcagctttgttaaaaaggtagtgacggattccgggggaacgatagagattgacagcgagattggaaaggggacgagcattgaacttttgatgccggaggataaggaggagcagaatgagcagcagggagattaaaattctgttggttgacgatgaagcggagatactttatgcgctgaaggcggtgattgagacacagggctggaccgggctgattgcccagaacgtgaaacaggcattggaaatctataaaactgattcgccggatataattctgattgattaccatatgccgcatattaatggggtggagggggtaaaaatgttccgcaggcaggatccggacataccgatcatcgtattcacgatagatgaggatcagggcgtcgcggataaattcctggaagcgggagccagcgattttgcgacgaaaccgattaaggctcctgatattatctcaagaatacgtgttcatatcaggctgatggagagtaaacggacggagaagaacgataactggccgtatctggttaaggggattggcagttccacgatggagctgattaaagatgccatgagcggtgagatgcagtatctgacggttgaggagatttccgggaggacggggctggcctaccagacaacataccgttatcttcagtacctgaccacgcttgaaaaggtggatgtgaagagcagttacggaaaaaaagggaggccaaaacagagctaccggctgatttgagctgtttaatatggtggaaaaagagttgttttagcgtgagtttatagataaaatcacgaaaaaacagctctttttttgtatatttcaacgagagataaataagagaaaaaatagaagtttcaagttgcctatgatactatgattttaacaaaaacataacacaggagggtatcatgaaaaagaaagcaattgtagttttaatgtgtgcggcaatctctttagcggcagcgggctgcggccagaaagcggctccggaaggcgggcaggcggtaacaacggcgcaggcggccggtgatgcggcacaggagcaggcagaggtgcagggcctgacagaggccatcgcagaagagccggtgcttctgacatcggcaggccagagcgcggattatgaaatggtaaagacgatgcttgataagaatgatattaagtgtgaaaagaacagcctggccacgtcggccgatttagacggcgttaagacgctgatgctggcagtgggcggttcttccaaaggactcggagcagcgggaatcgatgcaaacggcgaattggagcgggtgactgaattagttgacgcggcaaaagaaaaaggaattatcgtgattgcggtacatgtcggcggagaggcaagacgaggcgagctttccgataaattcatcgctcccagcctggaaaaagcggattatgcaatcgtagttgcagacggagataaggacggacttatgaaagggattgcggctaaagcgggcattccgtttgacgaggtcagcagtatggccgacgtggttccaaagcttggcgccgcattcaaataaacagtccggggggtacatatgagcatcgaattaattatatttttagccatggtaattacgttcgtggcaggatgttttcttttgaaacttcctgtaagcctttccatggtgctggcggcggtaatcggcgctctgacgggaggctacggctttccgctccgtcatctgatagagggcacgttctcttatgtggatacgattctcgttatcacgacggcaatgatttttatgaaggtaatccaggaatcaggggcgcttgacgcgctgtcctcactgatcattaagaaattccacaagacgccgtcgcttctggtctgcctgattatgctggtgattatgtttcccggcatgattacgggttcctccacggcagcagtgctttcagccggttcgattatggctccggtgctgatgctgataggaattccgcagcttgagacggcctgtatcctggctatgggaggcatcctgggtatgatagcgccgccggtcaatataccggccatgattatcggaggcggaattgacataccttatgtcggttttgaacttccgctggcgcttctgacatttccgctggcatttatctttgccctgatgtttggcctcaaatatgtgaaaaaactggaatacgatgtaatccgggaaaagctgaatcaggagcctggagagaaattcgggtttaaaatctatattccgatttttgtggcgctgattctcatggtggtgaataagacggtgccttctcttcccaacctggggatgccgctgattttcatgattgcttccgtgaccggcctgtttaccggttacaaaatcaatgtggcaaaggtgtgcaaggatgctgttaacagcgtgcttcctgttctgggtatcctgatgggagtcggaatgttcatccagatcatgacgctgaccggtgtccgcggatttatcgtgacaacctgcctgagcctgccggacggcttcttatatgtggcgatggcgattacgataccgcttttcggagccgtgtcctcctacggatcggcctctgtccttggagttccgttccttctggcatttctgagcaaaaaccagattatcaccgctgcggcaatctcgctgatcgcatcccttggagatatgatgccgcctacggctctggccggaatcttcgcagctcaggtggtgggccttgataaatacacaaaagtgctgaaaaagtgtatgatcccctccctgatgatcattgcatggggaattgcctttattctcctggcaaattcactggcgccgtatattgtgattaagtagagggggagggaaccgggtatgattacattgatttaccgaggaattatagcagttgttttaatatttaccatttggaacctgttcgacgaagagaaaatcacgcttcaggccaacgcggcgctcgtagtgattccgcttattttaagattattgatgattaaatagggaggcagacatgaagaaaaatcatataacagcggctgtctgccttgcggcagcgctggctgtgaccgtggtgacaggattaaattttgcgtcactcaaagatctgggcgagattaagccgggagacggagtgacagggacaaagttgctttccgagtattttgacggaataaagggaagcagtatggacacggaagtttacatactggagggggaaaaaccgggaggaaaagtcttaatcctcggcggaacccatggaaatgaaccggcaggctatctggctgccatcacatttatcgaaaatgcaaaggtggaggagggaaccgtctatgtcattccctatacaaaccggagcgggatgacgcacaatgacccgcaggaggcatccccgcagtacctgaatatcacgacgcccagcggtgtcaggaaattccggtatggctccagggcctctaatccggtggatcagtggccggatccggatgtctatgtccacgcggcatcgggccagcagctttccggctcggagacaagaaacattaacagggcctatccaggcagaccggacggaaaccccacggagcaggcggcttatgcaatcgctgagctgatccgggcggaggatatcaacgagacgttcgatcttcacgaggcatcaccggaatacccggttatcaacgccactgtatcccacgaaaaggggatgtcgctggcggcggccggtatgatggagctgactctgggaggaatccagatgtcactggagccgtctccggtcaatctgcacggactgacccacagggaactgggcgactatacggatacgattccgctgctgatggagacggctaatgcgtctcagggacgtctgcgcggagcgacaaatgaggctctggctctcaccggaaaagataaggcatatgtaaaaagtgcgaagctgggatttctctatgttccctacgacgagaacggtcatccgattgaggagagagttggaagacaccttcagggtgtgattgaatataccaatgcctacaaccagttgtatcccgataaaccggtggtattttccggggttccgacctatacggagctgtttctcagctcagacgggacggatctgggggaacgagactgggaagctatctgaactagacgaaacggcggtacggtgaaatgttggtttcaccgccggattataaaaagaagcctttcacaatgaggctttttatagaaaataggaggaaatggatatgagaaagagaagtttagcgctcctgttaacggctgcactcgtggcgtccatgtctgtaacgggctgtcagaaggctgcgccgacagcgacagaggctgttacggaatcggccgttcagacgcaggcgccggaagaaacggaagcggaaacggaaaaagcggaggaagagggctggaaaccttacgacgaaaatggccagattaagagagacgaccgcgacggaaacggcaaaaacggtgtggtatcgaccggtaagtatgaggcatccaaaattggcgcggatattattgaggccggcggcaatgctgtggatgcggccgtagccgttggctttgcgctcggtgtatgcgagcctcagtcatccggtatcggcggaggcggatttatgctgatccattccgcggatacgggtgagaatgttttcgtggatttccgtgagccggctccggcaaaggctacgccaggaatgtggccggttgatgaaaatggagaactgacagatgagacaaagtgggaaggcggcccttcggtgggagtgccgggagaagtaaaaggactgctgtatgccctggatacttacggtacaatgaccagagaacaggtcatgaatccctcaattgagatggctgaaaacggatatgaagtatcggcggtaatgaacagagacatgatggaaaagtttgagaaacttacccggttcaaggcctgcggagatatttatttgaaggacggatatccttacaccgtgggtgatgtagtgaaaaacccggatcttgcaaagacgctcacgatgatccgtgataacggagccgatgcgttttacaagggagaagtggccgaggctatggtcaaagcggttcaggaatcgggcggaattctgacaatggaggatttggccggttacgatatcaagctcagaactccggtcagcggaacctacagaggctatgagattctttcctccccgccgccttcatccggcggaacaacgatcgtggagattttaaacattctcgagaactttgatgtgaagggaatgggacataattcgaaggaacatctgcatgtattgacggaagcaatgaagatggcatataaggacagaggattctttgccgccgacactgattttatcgaagtgcccctgacaggaatggcttcaaaagaatatgcgaaggagctggcttcccagatcgaccttgagaaggcccaggtctttgaacacggtgatgcatgggcctatgagtctccgcagacgactcactactccatcatggataagcagggcaacattgttgcagtgacaaagacggttaactatgtattcggctcaggcattgttccggagggatacggatttatcatgaatgacgaaatggacgactttgatgctgaggtcggcacggccaatgaagtacagccgggcaagagaccgatgagttccatgtccccgaccatcattctgaaagacggcaaaccggttatgacaatcggcgccccaggctctcagagaattatctccggagttgcccaggttatctccaatgtgattgactttgacatggacattcaagacgccatctcagcgccgcgaatccatgcaggctccgactggacgaccagcgacgagacgatcatgattgagacacggattgacaagaatgtaatagaaggcctgaaagccatgggccacccggtcctggaaaccggagactggatggattatccatgcgtacaggcggtagagatgctgccggacggaacgctccggggcggtgcggacccaaggcgtgacggaaaagctgtgggatattaattgagatccggaggacgcgtccggaacggacagcggccggtgtggtgggacgcggatcctgccgctgccactaggcatttccagtgaaaaagaacaactgttataaaagtgaagtatcaaaaagggattttcgtgaaatatacgcacgaaaatcccttttttggtgctgcagcaagctcccacccagcttaagacgtgagacaaccagcggccgcaggccagagaacgggccgatacacatggcggagcctttcgtcccgccgataaccttcctttgggcggaggggaagataaagtctgcggatgcctttggaatccatcgctgattagcgagactttgtcgagcttagcagcgcgatgcattacacggagtgagaacgtgctcctcagacttgattttccctgcagccccaacacgtgacagtccttcatcgggacgaaagactcatataaccaactccatcaccccgtccgccggcctgcggcagcgtcctctcgacttaaataatcattccatcgaataaaacttaagaatccggtggacgacagccagatgattccggatgcgcatgtccggctcatcctcctgtgagacttccaccgtgatggcgggaatgccgagcgtctcagtcacagtccggttcaggctgcccttcggtgttccgttatagcaggtaaaggggcggaggtattaagcgaaccgtcctgggattccagcaggaggtcgaaaatcagcccgtcaatattctctgaatctgtgataatcagagagtttcccagaaaatcccttctatccccttcgcgcgacgcctcatggagatcgatgacaagatcaggggagtattcaataattttttgatagatggaagcggccagttcatctgtcaaatcctgttttttgccgcccggaaaagagcggtttagatcgcggtacagttctacgttacgctctccctttcggcttcccggtgcattggcaggagagaggacgatcagggtaccggtctttggctttactttctttagcttgtccgcggccctccatccggaggtttcatccccatggatgcctccgacaaccagaatggtatttccgggacgccgctttccataatggtgaaggaggtctcaaggggagtatgctccatgataagttctgttgttccggtcggtttccggcacagataaagaatgactgttaataaaaacagagccggcagcacaagccggagacggcttctttttttgtgttcagacatattgtggtttccttttccatcgggggttcttaagaaaagtatacaacaggggaggtaaaaaagatagcgctgaaaagaaggaacgggctgcgcaggtgaggacgccgccggtacggccagcggacggggtggtggggtgtgtgtatgagtctttcgtcccggaggaagattgtcgttgtttggggctgcgggcgaagataaagtctgcggagcacgctcccgctctgtgaaatgcatcgcgctgctaggttcgaaaagacctcgccaatcagcgatggatttaggcggcatccgcagactttatcttcccctccgccccaaggccaggttttcgccgggacgaaagactccgccaagtgtatcggccccgtccactggcctgcggccgctgattgtctcacgcgttaagtgcggggagcggaccttgtcgaggccactcagtgctaccgtgtgcgggaaatatgatatgccttcaatgcgccttttataaaaattgcggaagaattgatatcagcttgccggaaacacgtagtggccgcgacagggtcctccccatttaaggttagagacaatcagcgcccggagcggaccatgaccggtgtgcgaaaacctccgcctgagtcttacgtccccggcgataacctgacccggggaagtaggcggaatcaattgcggaggggacatgggagtccgccggtgcttagcgaggtccctcacgagcttagcactgatgcgcactccaaagagtgcaaacggtccccacagcaattcattccggccggattccccctcacgactaccttcaaccggggacggaagactcagccatccccctcaccacaccggacatagtccgttccggacgcgtcctcccaacctcagttaaatctccatcagaaaatttggaaaaaattcacataaatattctgtctgcttttacagtcgatataatatttttgttatatactggataaagattaagtctttgttgcaataccttaaatttgatatactgaacctattaaattcacagctgcgattatagatttataccggtatcagaaaggcaagacaatgaataaaagtaacttttttacggcgtcggacggggcggttctttattttgaagaccagggaaccggagtaccgtttctgctgatgccaggatttctggcgacaacgaagttttttcggaaaaacatcgaagaactgtcaaaaaaatacagggtaattgtctttgatccaagaggacaggggcgttccggtaaagtatgcggcggcaatacgatggagagaaatgcgctggatatcagggatctgattgaacatctgcagcttgaagacgtaatactgggcggctggtccatgggctcgtccgtagtgatatcctatgctgcgatgacacaggaggctcacctgaagggactggttctgatagacggttctttgttcccggtgtctcccgacgaatggaacaaacaccgctcccggaattataacattgataactggcttgataattatatgccgcttgtgtatgacagagatgacttttacgagcgttttgtggcgagaatttccaacggagctatgacgcaggaggatcgggaatgggttatggaggaatttatgaagacgccgccgtggtcggccctggaattccattatgatttctgccataccgataattacagtaatttaaaaaagcttacggtgcccgtgtctattttcggcggttcgtcggacgcttacgggctggagatggtggatgcatttgcctcacagatcaggggatatgtggagctgaataaattttataacagcggccacatgatgttctattacgagtcaaataaattcaatgaatgtatcagccggtttatagaccatgtggcggccgacaaaagcaggggcttacggaggaatccagacatgtttgtggtgaggcgccggcttttaattagaggataggctcattataatataacaaaacataagaaatggagtggagaaaactatgaaaaaaatgttagcaatcagtatgtcacttattatggcggcttctttagcaggatgttcgtcaggcggcggcgccggaaaaagcacgcagccccagacggcacaggaaaatgcaggagataaagcgcccggtgagccaacgtccggaaagaagagaacgatccagcttggccatattgatccggcccaggatgtggatccctatcatacattggcaatgaattttaaaacagagatagaggaactgtcgggcggggcgattacaattgacgtaattacggatgcgcagttaggcagcgagctttccatgatggaaggaatgaacatgggtacaattgatatggctgtcatcacgaatttcagcttcagctcttctgtccccgactttgcagtgtttgacctgccgtatctgtttttgaaccgtgaacaggctcacgcggtattggatgatacctccataacggatgcaatggaggaggaactttataatgacttcggtgttaaaatcttaagctggggcgaaggcggattcagaagcacgatcaataaaaaacgcccgattaatacaccggccgatttaaagggaattaaaatccgtgtgcctgaaaattcaacttatgtagatacgttcaaggcgttggggccaatcctacaacgatggcatccagtgaatgctttacagcccttcagcagggaacgattgatggcttagagcagccggttacaccgatgtatacatataaatcatatgaactctgcgactatatttcctttaccgaacatttctattcgccaatcacgctcagcgtgtctaaattcatctgggatgatttgagcgatgaggagaagggctggtttgaagaggcggcgaaaaaagcggctgaagaagagcgcgcgtctgcgaaggagacagacgacaagctgttaaaagagatggaagaggccggagtccaggtgaatgaagtggcggataaacagcagttcagagatgcggtaaagccgattcatgaagcctttgctgcggatgtaaataaggagttactggacaagattaacgagaaaatcgcagaaatccagtaaagagccggatgaggagaagtcctatgaaagatgcattggataaagtatgcagcatggtaaacagaatatatggaggagcagccctgctcctcctggctgtcctgaccggagccatggctgttcaggtatttacaaggtacgtgctgggttcttccctgtcgggaacggaagagctgggacgatattgttttatatggatgacaatgctgggagccagcatttgcgtctcatccgattcgcatgcagcggtgacgattctgaatgatcatttaaaggggagaatgaagggcggacataaaatttcggtggatatcctgattctggcctgtgcggtactcctgtttatacaggggattaaaatggcggccatgacgaccaggcagcttacgccgaccctgcatatcccgatgtcggttatttactgttccctccctgcaggggccttcggaatcattctgaatggaatcaataacctgattaagagaatggatgaggcaaaatcatctgcccttgtacaggagggggcggacgatggagaaggggggatgaggtagatggaagtagcactgttattaggagtcatgatgatacttctggcttatggcgtccccatcgcattttccattggtatatccagcagcgtttttttgatggtaacacagatgaaaccgctgattctgattgcgcagcggacggttctcggtacggacagctttccgcttctggcaattccgctgtttacgctgggaggttatctgatggagtccagcggcctgtcaaagcgtctggtaggatgtattgagaagcttctgggaggcgcgccgggaagcgtcgggactgttaccatcgtctgctgtacgattttcgcggccctcaccggctcaggccctgcaacggttgcggcgattggggctatcatgctgcccgcaatgctgaaaaacggatacagtaaatcggaaacaggcggtattctggctgcggccggttccctgggcccggttattccgcccagtatctgtatgattgtatacggcagcacgatgaacgtttcgattccggagatgttcgtggcggccattgtacccggccttttgctggcggcatcctttgtagcggttaatctggtgatgaacaggaacaaaaaagcggcgtcagccgtgaagtacagccggaaggaagtaatggaatcttttatccaggcggtgccggtactgcttcttccggttattatcctgggcggcatatatacggggatctttacgcccaccgaggcggctgtcacctgcgtaatttacagtctggtacttggaattgcataccgggagatgaaattttccgatttgatcagcgcaatgaagaagacgatcgtaacctccggcatggtgatgtttattatggcgatgtccgcgaacttcgggtggattttgtcggcggcgaagataccgacgactgtggccaatgcgctggtgccgtatctgggcaaccggttcgtatttacggtacttctcttaatactgcttttcatagcgggctgctttatggaagtgctggccctggtggttatcctggctccgatcctgattccgatcggcgttcagctgggaatggatccgcttcatctgggggttactttctgcattgcgctcgtaatgggactgatcacgcctccatttggcatgaacctgtttaccgcggcggcggtctgcgacacgacgtttgttgagattgtcaaaggagccttgccctatatctgtgtggcattgattatgatttccctatttgcttttgttcctcaaatcacgttattccttcccggattgatggcggggtgacggcatggtggagagaaatcttttaaacggagtaatagaattgcacgttcatccggcgcctgacattcagcccagaaaattcaccgatatggaacttgctgagcagatgaaggaggcacaagcggcggcagtcgtactgaaatcgcatacgtttcccacaatggcgcgggctgaaatcgtttcccgactgacgggcttttccgtttttggttccatcacgctgaatgatgaggtggggggatttaatccggctgcggtggaggcggctcttaaccttggtgcgaaaacggtatggatgcctacaaaaagcgcggcaaaccacagaaagtattttaatcttccgggagggctgcatgccctgaaggacgggaaagtggacaacgggcttgactcgattctgcacatgatagcggacagggatgttatcctgtcgacaggccatctctcatttgaggagcagagggtcgtgattgagagagcaagagatctcggggtcaaaaagatcgtgatcgatcatcccgagcttgcgcttaccaggctgactgtctggcagcagagatatctgcagatattcggcgtttacttcctgcgctgtgccgtctatctcgatttgagccgttcctacgcggatgtactcaagaacctgacagagcttgggtgttcggacacggtattgtcaacggactgcggaaataccggcctgccgtcctggcccggactgatggaggagtacctgcagtatctgctgggacatggcgttacggaggaagagctgaacctcatgacgaaagttaatccggctcagcttataaatctgttataatgaaataggaaataaaaagaggcaagatatcccatccggtttagatgggataccctgcctttgttgatgacggtgacctgtgcgcggagcgtgcaggttatcgttgcagtttatttcgcatggctgaaaattactcgggcagtgacaatccagggagggacaacaaatgacattaaaagaattacagtatattgtgacgattgcggaggagaagagtatctcccgcgcatctgccaggctgtatgtatcgcagccgtatctgagccagtgcctgatgaggatagagcgccagcacgacatgccgctgtttcggcgcacgcagcatggcctggtcctgacatttgccggagaacagtatgtggaaacagcgagaaaaattgtgaagctgtataatgatttcgagacagggctgtgtgagatcagcaatatgaggaagggacggctgacgattgggactaccattcatctgggctccatggtcttttccacaatactcccgattttcagggagctttacccgaacatagagctgaggctggaagaagggccgtcacagaaaatcgaagaatatattatcgcgtcgaaggtggatatcgggctgcttcactgcccgctcaaggacagtgcgatatcctatattccgatccgtgaaaataattttgtggcggtgctgcataagggcagccatctggaagaattcttttacaaaaaagaggagagtccctatccatttatcgatccgaagcatttttcgggcgagaaatttgtcctggcatatccttaccagagggtgaggcagatagcggatcagatattggcggcggcgggaatccagcctctctcctgtctgaataccagcagtgtgcagacagccatgtgcctgtcggctgtaggactgggcgtctcgttcatgccggaaaattatatatctctgtttaattgtccggtagagccgcagttctgccggatggaggaagagttcggggcaaaatggacgatggcggttgcttatgattctaaggatatgctgagcgggccggcaaaggaatttattcggattatgaaagaaaatatgtgaaagaaaaaagggcctttcatctgcgcaaaacagctgcggatgaaaggcccttttttggtggcagaacgagccgtttatcattgcattcaggcgctccgcccgtgtattcgtctgcatccgatgaagcttgacaggtaaaaaactgtcagggaggacgaaaaataactttttgatcaagggaaggactgcgcctataatgaacgtatcgataaatatcagggatcccgccggaagaatttcaggtaatttgactcaatacagaaaggactttagtgagcgtaaaagcatgaacagtatggtaaaagtgaaaggaactccgtatgaacagggcgtaatgcagggaacggagcttcgcgaagtcattctccacaatatccgggaggtcggcaaaaagatggcatcggatcatgttgacatggtccgttatgaagaatttgttaaaaagaacgccgctttcctgaaacaggcgcacagtgatatatttgaggaaatgaaaggaatatcggatggagcagagattccgtttgatgatattctgatgctgaatataccggcctatttcatgacgggatattttaatcaggaatgcagcatgattatggcaagaggaaaggcgacagcggacggctgtacctatgtgattaaaaacagggatatgagcacctatatagagcaggccgtaatcgaacgggaatatccggacggactgaaaatagtggagataaacggcgccgggacagtcacctatccggccagcgggatgaacagctacggagtcggagtcacaacaaccggtttctggtcggctaaggctccctcggatctggaagcggcagagtattcccatatctttttaaatgtccatcttctgctggcaaaatgcaggacagccggggaagctcttgagtatgtgaagaattcgccccgcatgaatggactgaatattattattgtcgaccgggaagatgcatggctggctgaaatgaccagagatgaggtttcaattgaaaaggataatggaagcggtatcttattccgtaccaatcactaccgctccgaacggctcagccatcttaatccggaggaaacagagtatccgtccacctacttcaggtacagaagaatggaggagatgcttgggaagcagtacggaagaatcagattccaggatttattccgtatcatgtccgaccatgagaacggagtgaatgcaatctgccgccacccgcaggagggggcgccatccaggaccatctccacaagcctgtttgtacttgaggacggcgaggcgtggacaacactgggaaacccgtgcgacagcctgaaatatgcactgttgaaataggaggatactatggattgcaaaaagtatatagatgaacggataggcagattaaaaaacatcatgtctgaaaaaggcattgatacggtcatactgaaaaagccggagaatgtcttttatttcagtaattttaatccggtattaaacagccatccggcggttatgattatttcacttgatgaagaaccgtgtttgctggtgcattcgatccgatacgtccacgcatgcgaggagggaaagatcaagaatgtcaaaatatacggcaaatggggggcgaatgttccgcttgcaatacatcctgtcgacgcggtgaggacacttctggggaaaagaaacagaaagctgggccttgagctcgattactgcagcgccggattctgcagtgaagtggaagataagctttgtcccgatgaggtggtaagtatttcatctgaaataaatatgatgaaaatcataaaagatccatatgagattggatgcatcagacgttccgcagccctggtcgataaaggagtcgaagtcacgattgattacttgaagcagggatactcggaagcagaggcatgtacccagggacagtatgcaatgagaagaatgtggcatgagaagtttccggaggcggaagtctgcggcttcggaacctcagaaggcggaatgatagacagtcttcatgtatggtgcctttctaacggacacattgcatatggctgtgactgcccgaggcattatcacccgcagcctggtgatttgacgcttccgatggcgtgggccaaaacggacggttaccatgccgagaatgagagaacggtcatagtcggagaactggattcctataaacagaatgcttatgacggcatgcttaaagcgcgggagagcattttcaggatattgaaaccgggagtgacgtttgaggagctgtatcttgccgcggcaaaggtttactctgaacgaggctttgattccattcttccgggcagggtagggcatggagtcggctgctccgcgcacgagtttccatccctggagcggggcaacctgctgcggctccagccgggaatggtgatgacggttgaacctggattaatggataaaacctggggaggtgttcgccattcagatactgttctgataacagaggacggctgcgagctgctcacccggttcgatacgggagccattgtcattgaatgcggtgacctgcgcgcggagcgtgcagattagcgattagcgcccagtcccgtctgagcatccaccacctcacgtaccgtattgacgaatgcctggattgtctttgaaagatatcgtgtgttcctgtaattcagcacaatgatattctttgaatcatagtcctcgatcgtgtaaaaacagtgatgtgagaagtcatattgggaataggtgataaaggtttcggggaaaatggatactcccagcccggcggaacaaaaggacagcagcgttcctacatttttcgtttccagaaaaatattcggggatatattcaggtactggagataccgtcttgtaaatgtaggtgttctcgaggtctgggtcatggccaggaacgggcatgattccagacagctcatcacaaaactgagatccggctttctggttgagaggacggtgtggttgggaaaataacgctcaatgacggtatcgggtatcacgacgataatattttcctcatagagaggaatcgtggtaatctgactggaaccttcggtcaggtaaccgatactcacatccagcgtgccgtttcgaatcccgttctccagttcgtccgttgagccttcgaagagctttaccgacacctgaggatatttctcctggaatgcacggaatgcggcgggaagaaggacctgggagcgggcgtgggtgcttccgacggtcagtgaaccgccgatcatgccgccgatgtccagcagctctttttgcaggtcatcctgcatggcaagaaactcggctgctcttttacgcaggtacatcccggcgggagtcagggtcaggggctgcttccggtcaaagagaggcacgccaaaactagtctccagtttgttgatatggccgcttaaggactgctgggttatatgaagcttctgggcggctctgcggaaattcatttcctcgcacagcaccagaaaatattgcaggtttaaaaaattaatcataaaaaagcgcctcctcagttatcatactttctgaagtatatcattaaatccggcggcgctcaatatagaatgcatgtaacaggcggaacgtacagacaaccgccttcaataaaaacggcgctttgcgtcatgtaattacaggagagggttagtatgaatcaacagaaggaaaaaaacagcatttttaaccgttttttggcaggaattgaatatatggggaataaaattccggatcccatgatgctttttgtatggctttccatcattacggtggcagcctcatttgtgctttcaaaaatcggattctcaggcgtcaacccggccacgggagaagttgtatccgtctataatctgctgtcggcagaaggcctggtgagaatgataacaacggcagtcagcaattttaccggcttgtcggcgctcggaatggttctggtatgcatgcttggagtcggagtctgtgacagagccggtcttttctcggtagcattgagaaacgtggtggagaattccaaaggttccaacttgaaaataatctgtatttttgtatttatgtgtgttatggcggatgcggcgggaggaaccggctttgttgtaatgccgcctctgggagctatcattttcctggctatgggaagaaacccgctggccggcatgctttgcgcctacggtgcggtatcggggcatttgcttcaaatttactcgtcacctccatggatgtggtaaacttaagctttacggagacagcggcaaagctggtagatccggatatggcgctttcacctgccatcaactattatttttccgcattttccgtatttaccctgacggccatggcggttttcgttacagtcaaggtggttgaaccgcgtctgggacagtataccggaaccggagcaggagaagaggtcagcgcggtaaccggtacggagaaaaaggccctgaaatgggcggttatcgccgttgcggtatatctggcggtgatactcgccggtgtggttccgggaaacggcatactcagggatccggaaacaggctcgccgattgcttccgctgcgcctctgatgaaaggacttcccttcctcatcgctctcctgtttttcattccgggcgttgtttacgggaaagtatcgggggcatttaagggcagcaaggatgtagccagagcgctgggtcaggcgatggccgatatgggaccttatatagccttgatttttgtctccgcccagttcctgaaatattttgagtggtccaatatgggtattattcttgcaatcaagggagcggatttccttgaagcttccggactgccgattccggtcgtgctggtactctttattatcatgtgcgcattaattaatatgctgatagggggcgcttcaacgaagtgggcaattctctcacctatatttgtaccgatgtttatgtttctgggatatcatcccgcattggcgcagatggcctacagaatcggagattccattacaaatccgatctgtccgaccttcgcctacttcggaatgcttcttgccctgtcacaaaaatatgacaagaatgcaggattcggtaccctgatggctaacatgctgccttatacaattgcatttttctgctttatgacaatacagctgctgatctggttcatactgggaatcccgttcggacctggggcgccgcttagactttcttaacagaaagtaagagagaatcccgcgagcgggattctctcttacttttcaaattccagtctgattttctgcaatagctccggttcggtgattacctgataccccgtctgcgccatggcgacggcagcagacagcatttctccggctgcaaaatccgtcattgtggcatccgtgaattcaggattatgcaatgcgggtccgccggcgcttgtaattccgatccagctgtgaatcgtgggcacaacattgctgacattaccaatatctgatgtagctgcgtatgtttctggttttttcagccggagcgttgtcaatttctcataattttctttgaaaacatctgacagggtatgatttgtcacaaggccttcaacccgattttcaaattccgttacatcaaccgacactcccgacgcccgggccgtatggcgcacacagccggccactctgtccatatactcctgaagctttttcttactcgctgcccggatataatatttcatcgaggcatagtcggggattatgttgggccggctccctccattatcaataatgccgtatatgttggcacccggaatatactgttttagattgttaatgttaagatatgacattaccaacgcatccagagcatttctgcagtcttccttcggcagggctgcatgggcggaaatccctctgaattcaaattgaagcgctcccagccccagtgtggtgccgctctcttcggattcggtgcagggatggcacataatgacagcatcgatattatcaaaggcatgagcttccacgaaattcacctttccgcttgtacgttcttcatccggtgttccgaatacgactactctgccgccaatgtcatccagaaccgattttaagccgcaggcagcgccataactcattgccgcgattatattatgtccgcaggcatgcccgatctccggcaatgcatcatattcgcagatgaacgcaattgagggacctggcctgccgcttgcgtactctgccctgaatccggtttccagcccatagattcctttaataacggaaaagccctcttcgcggaacatagctgccagcagttctgaggccatattttctttcaggccgatttccggattttcaaacagctcttttctaatccggtacatattttctttattcttcagtatatatttttcaatttctctttttcccattgacgcacccagctctcctgattttgattatattgaaagattttaaaatggcccaaggtggatgaactgggcaatcatgacgacaacagcacctcccagatattgcagtccaatcaggggaagaatccattttacccatttttcccatggtatattggcaagagacaaagctgccataaagtatcccgaagtcggcgtgagtatattggagattgcatctccaagctggaaggcaacgacagttgtctgtctcgtcacgccgattaaatctcccagaggggctaaaatagggattgaaacggctgcctggccggaacctgacgggatcaggaaatttaaaaggcattggaacagatagatccccaggctggagactgccgccggaatctgggacaacagggaagaggagctgaataatattgtatcgattatatttccctgggtcaggataacgagaaccgctctggacagtcccacgaccgtagccccgacggccagggactccaggccctgtgcaaaggttaccgcatattggttgaaacgcattctgaatacggcagcggatgcgatggaagcggccaagaagagtgaagacatctgggtgatcccccatccccatttcataacgcccagaacaagtataaccatcatgccgaaaaagattgccagtaccgctttatgtcttcccgtcagttcctccagatcttccagattcagaatatcgcttctttcccggtcaagctcatacatcaggcttgattcaggatttttgcgcaccttcatcgcatagcggtatatgtaggttactgcaatcgtaaacatcaaaacaagtgaacacattcgaaactgccagccgcttaacagcggaagctcggcgattgtttgggcaaccccgactgtaaacgggctcatcgctgagcaggagacgccggcgcaggcgcctacaagcgctatggcggcgcccgtgatggaatcaaagcccatggacattgccaggattaccataattgcgataaatggaagcgtttcctccgccatgccaaatacgacgccccccgctgcaaatgctgccattaagactggaattaagaatttgtccctgccgctttttgcccctgctacggcaatacgtcctatgccgattttaatggcatctgtagactgaattacatgaaagcttcccccataatcaggagaaaggcgattatttctgatacttcaccgatcccggccgttatacagttcagcgctgcaaaaattcccaccggcgtttgctcgacatagacaaaagactccggatcgatgaccattcgtccccctaattctacccgctcaaaatgaccggccggtatcagataggtcataattgatgccgcgataatcagtgtgaataaaatgacaaatacatgtggagcctcaaacctgccctttctcttttttaccccaaacatttgctctccttttcaatttttttgtacgctgcagacgtttacaattttgaagatgcatcttcgatattctatatcagcaatattcatgccatttatggagtttatggtgataatgtctataaattcatatattatcagtgaatatagagggaattagtgcttgaattggattttaccagtgcatattttgacaaaaaatgacaagaaaagggtgacatgtcaacctttatctgaaaaatgacaatttatttggtcgcactgcggcggcagaatgcagcagaaaatacagagatcgaaaaaagagcccggcatacaggactctttttcgttatcagcggtaaagatttaaggggcatatcattaaccggaatattctatcagttctcaagcattatgttcaaaatttctatatccgtggccttcatgccttcccgtcccatacggccgatactctggatggtatcttccacggtttcttttacaagcccttctccgggctggaaaacgcgtttgtttttgctcagatggaaggctgtgagggcgcagtcgacagccgatgcgatctttgccgcacaggaaggcttggccccgtcgcagaccataccgccgattgtggcgatagtgtcggtaataataccgcagatctcgtcataggaggctcccagcatataagcgatgccgacgccgcttccgcaggccgcgcttacggctccgcagtatgcggagaggctgccgatatactttttctggtgcagggagatcaggttgcccgccacgagggcgcggtagagtccttcatcagaaatgttatattcttttgcgtattcaataatgggaagggatacggtcattccctggttgccgcttccggaattgatgacaaccggcatcgggcagccgctcattctggcatcggagccggctgcggcagccgctttggcgcggatggcgacgtcggagccgaaagtatccagcagggtccggcctacctgggcgccccagggattattaagcccttcctgtgaaatggcggtgttacattctatctggcgtgaaattacttcactgatatcactgagatccacacagtctgcaaattccagaatatcttttacatttaagagggatttgtccggaccggaggactgctccgactgttcgtcatccgtactgaagataatcttgccgtttttcacgatcttcgtgatattgctgtgataatcacgaatctcaacggtagccgattcctccccggcgtaggccgtgataataatgtagagattttcaacgccttcaatcaggccgcagctgcaaaatccctctttcaccagcttctgggtggtttcgatttgttccggtgtgatatcctcgagtactgccagaatccgttttacgttaccgccaacgattccaagggttgcggctgtgtcaatgcccttcatgccgccggaattggggacggttacgccttttacatttttcacgatgttgccgctgcagtttatttcacagcgatccggcatggcttccagaacttctcttactttggctccggcataggcgatcgcaatcggttccgtacagcccagagccacaacgagttcattctttaagatagaaacatacgtattataaacttttttgtccatagttgatttatcctttctgttgtttagacgtaacagttcagccatgatgtattccgcaaggcgttttcgctgctttttgcgaaaatcccgagttaagcggcgcgacgcgatgaaaagtgaacttttcaccacaatcaacggcgttttttgccgtttctgtgcatcatttgctgcagtttggccgaaggctgaactgtaacgtttagactgcactcagcagtcctgtatgatttgttgtcagattgaccttgcaatttacaatttgtccccgtataattttacctgagagaaacaggaggagctgagactatgaatttcctgaatttaaaatattttatcgtgacagcggaggagatgaacttcactaaggcggcaaaacgcctttttatctcccagcagtcgctcagtaatcatattgcaaagctggaagattatttcggcgtccagctctttgaccggaatacgccgcttacgctgaccgacgccggggaaagccttcttaagagcgcccggaaaatcttaaatgtcaagcaggaggcggaactggaattgcaggatatacgtgatttccgcagtgcggtgcttacaatcggcgttcccaatacgagaggttctgtgatactgcctcccctgctgatgaaatttggccgggattttccgcaggtgcagatacgccttgtggagggtacctctaatgaaattaccgacgcgctgtataaaggcgacgtggattttaccatcggttttgaactggatgcgcctgataagatccgcacggaggttctgcacgaggaacatacgctgattgtggtccccaataatatactggatgagtatttttcggaggaggagcagggcggactgctggagaagaaactgctccctatccaggtctttgcacgctgcccttttatcaagatgaaacattccaactggatcggcgagatatttgaaagcagctgccgcgagggccagatgacacccattgtggcgctcgagacagtcaatatcatgaccatggtttccatgtgcagggccggctacggcgttatcatctgccccagtgtgttcgtggaggagaacagcccggtgctgggcggggaaggaaaagaaaatatccatacgtttattctggatttccctaatgcgcacaagatgattgccatcaattacctgaagaataaatatcagacaaaagcagccagggaattcatcgaaatgacgaaaaaaatgctggcccgtccataagaaggtttaagcaaaatggagatttaactgaggttggaggacgcgtccggaacggaccatgtccggtgtggtgaggaggctggctgagtcttccgtccccgtgggaggttggtcgtggaggggaatccggccggaatgaattgctgcggggaccgtttgcactctttggagtgcgcatcggaatgctaagctcgtgagggacctcgctaagcaccggcggactcccatgtcccctccgcaattgattccgcctacttccccgggtcaggttatcgcagggacggaagactcaggcggaagttttcgcggcaccggacatggtccgttccgggcgctgattgtctctaaccttaaatggggagggccctgtcgcggctactacgtgtttccgcaggcagataccaaatctagcgccttttataaaggcgcaatgaaggcatatatcgtatttcccgtacacggtagcactgagtggccgcgacaaggtccgcccccgcacttaacgcgtgagacaatcagcggccgcaggccggcggacggggccgatatccccggcggagtctttcgtccctgcgaaaacctggccttgggcggaggggaagataaagtctgcggatgccgttgaaatccatcgctgattagcgaggtcctgccgagcttagcagcgcgatgcatttcacagagcgggagcgtgctccgcaggctttatcttcgcccgcagccccaaaccacaacaatcttcccccgagacgaaagactcataactccaccccaccaccccgtccgctggcctgcggcggcgtcctcacctgcttaattaaatctcccttcgatatattcttttactctctttacatacgcgagcatttcgtcatccagcggataacggataacgcagcccggagtcaggatctggtgaaggcccctgagcgttttaaaactatcgtaaatctggttctgaatctcattcttatgtccgttggtgatatccatacgcttaaggccgcccatcagacattttcccgtcatgaggaaagcctcgtccagttccggaagagtctcaccggcatgccagttgaaaacggaaacaggataatctttcaggatgtcgaacatgatattatttccgtgggcatgaattgtattgaaccagccgtcttttgccgcttccagaacctttaaatcatatggcttgccatattccagatattcctccgcagtcatggagtcataggaactcatctgggaagcgaaaaatacgccgtcggcgccaaggcggatggcctctgcagtcagagccatggttgtttcggtaataatatccagcgccttctttacaagctcgccctggccttccctgatatgggtcagcatcgtcttgccggaaatcttgtcggccgtcgttatggggctgaatacggtaaacagaacaggaacatcttctccttttgttttttcaagcaggagcttcagggaggtcagctcccttgcgaggctgccttctgtaatcggacagggagtcagcttcagccagtcggctgcttccttaaccggagttttggttactttggcaacccctcctttggcaatttccgaatagtcaatctcgcatccgaaatcttcaattgggtacatgccgttattcatagtctttataaaatccacatcataagttttgtagaattcataagtcttttctgccagcagggcaggatccaggtcgatgcccggaagatgggtccataaggaatagggtaatttgtccggtttagttccttttacagctgcctggattcgttcacgctttgtcataattcaacctccaatgttatatgtatgcatttttattaatagtctgtaaattcctttcggtaatcccagtataaaaaagagagtggcataatgtccaacaggtttttttattatgataacagctaaatggctgtggaaatgatatataagtgtgaaagaattattaataatataaataattcagaaattccctaatattggaagaagaatatcaattatttatcttgtaattaatatggaaatttggtattaaatttaagaagcgttcgaggcatagaaaaatgtgctgtagaaaaatgtcacatcctgactgcatgaaagaacaactacaaccttttgactgttgaggtaaagggaaaagctgttggtaaatttggccatgttattatatgataattttaaaaataagacaaaattgaacaaaagaaatcaggatttaaatcgcgccggaatatagcggatatcggctacttgcccggacgtgagttgaaattatatttatacatatatatatcagaaaggaaagggaaaattatgaagaagactactacaaaattactggcgcttgcattggcagcggttatgccgcttacattggcgggatgttcaggaagccagggtacatcagagacaaaggcagaagcacaaaagggcggggaggccgaagctccgaagaaagcaaaaggcgagtggccggcagagacaatcacacttgtctgcccattctcagcaggcggcggtaccgatatcggagcgcgtaatatggcgacggctctcggcaaggagctgggcgtaaatgtggttgtagagaaccagacaggttccggcggctggattgcctggaccgatttaattaccggcgactatgacgacggatatacggtaggacttattaatcataactatgccatgggagaactggatccggacaacccacgccagtacaatctggacgacgtgcagcttctggctaaccaggcaatcgactacaatgtaatggcgatccgcagcaatgacacacgttttaccgacttggacagctttatcgagtatgcaaaagcaaatccggttcttgtttctgcccaggcgaccggtattaccgacggcgatgcaactacggcagagtggtttaataagaccttcggaacacagattacggtagtaccggtagacggcgcttccgacagccgcggtatgttcctggcaggcgatacggacgtattctttgcttccatttccgatgtacagagcgcatatcagtccggtgagatgaaaattgcctgtgtcttctccgaagaacgcagtgattttatgccggacgtacctactgtaaaagaggcaacaggcgaggatttcgtggcattcgcagcacgcggttacttctatccgacgaatgtgtcacctgagattgcagctaaaatgacagaggccatgttaaaggtgatggaggatcaggagtatgtcgacaatatggcggcactgggactgaagcttgacaacacctccggtgaagcattcaaagaactgcttgagagtcaggtagatacccgtaaggagatctggggctctgctgaataatagtgaattaactctgcctgccgtccccctcgtatgtgagcggggcggcaggcagcaacactaaatgacctgacaaaagaaagggagtctgtcgatatgagtaagaaatttcacagagatgtgtgggtgggcctggttctgctgttgttttgcgccgccgtgcttgttaatgcggtgcagatttcggggcaggccgcttatctgccggttgcactgaccgtcctcatggctgtctgcgcagttttcattatattaaaagggcttcgcctgacaaaagaacagatgggggaatacagttatccgctgactgttaaaaatagtaaatatgcattcctgtttatgttttttatctttatctattatcttggatttcgatatattacatattggattgcaaccccgatatttatgctttttacacaaaagtatctgaaactgaagtcattcaagattaacctgctgattaccgtgctttatacaatcctcgcgtttatcgtgtttgtagttattctgcaccttcctatctataaaataggtattttgggccggtttttccgctatctgtaagaggagggagattaaatgttagaatatttatcgatcgcgctgacctcattcatgtcaattgaagtcataatcgcattaattgtcggcgttgtaggcggtatggttatcggaattatcccgggtctcgggccgtccgttggtattgcccttctgctcccgatctccttttccatgagcccgacagcagctctggttatgatgacagccatgtacaccacaggcgtttacggcggttcaatcaccgctgttctctgtcacactcctggtacggcagcttctgccgctactactatggatggttatgagatgaccaaacaggggcgcggcatggaagcgatttccgttgttacggtagcgtccgttgtgggtggaatcattggaggcatatgtctgattctgtttgctcctgcactcggaaagatcagcctgatgttctccacactggaatacttcctggtagcctgcttcggcgtgcttgtagtagccggccttaccggtgaaaatcaggcgaaaggtatttttgccgctctgtttggattgctgattggctgtattggaatggactctatcagcggtgtttcaaggtttacttttggacagctctggctggaggacggacttgattcgactccgattctgattggcctgttttccatctcccaggtactgattctggtggagaagctgatgcgcggtacgggttccacgattgtggaggatcccagcgccggtctgaagggaaaacgctggagcaagggtaacggaaagaagctggcgccgacaatgcttagaagctcggttatcggttcctttgtcggctttatcccggcggccggtgcatcaatcgcagcctggatcagctacagtatggcaaaacgtacctctaagaatccggaagaatacggcaaaggctctatcgttggaattgcagcttccgagtcggcaaataacgcggcctgcggcggcgccatgattccgctgttcacactgggtattccgggcagccccgttaccgcgattctttacggcgcgctgctgatgcacggccttcagccgggcagtgacttatttatcggctccaaagctccgacaacctatgccattttcctgggttacctgtttgcaaatattttgatgggtatcatcggagtatctatggcaaaacatatggcccgaatctgtctggtgccaaactccgtgctggttccgattatcgtggctcttgccagcatcggtacatatgccctgagcaacagcatgtacgaggtggtaattatgctcgtattcggacttctcggctatctgatgaagatttacggctttgagccggcgcctctcgtactgggtgttgtactggctgatattctggagtcaaacttcagacggaccctgataatcgcggcgacgaagggcggtctggtaccgtacttcttctccaggcctatcgctatcgttattgttgttgtaattcttgtttttgccctggtaccggtaatccggaaaatgcaggctaagaaagcagcggcgaattaatttcttataaaatcggaaaatctccccgaggaccggtcctgtacggtctcctggggagatttttgattcatttaaaataattttacatataattataaaatccgcgcattctaatgatgaggtgatgaatatgatcgataatcatgaacttccaatcggcttcaccatggaactggcgcagcattcagatatactgaaccgttttgcggccctgtctcatgatgagcaggagcgttatatcgacggttccagagaggtggagagcagacaggaaatgaagaattacgtggaaaatatgttccgcgggtaacaggccggatgcgctgaatcaatgcttggccgtttaccgttaactatcagtttctgccatttttttaagggaatttccgctgaaccggtaggttgtccaatcttccatcggctccgcacccagggaaaggtagaaatcaatgcttggccggttccagtccaggcagctccattccagacggccgcagccccgttccacggctgtggccgccagttttttcagaattgcttttccatagccttttccccgatgttccgggagaataaagagatcctcgagatagattccggctcttccgaggaaggtagagaagttatggaagaaaagggcgaaaccgacgggaatgccgttctccacgacaaacagcacttcggcctttcccttgtcaaaaatccattcttccagcagttcctcggtcgcaatgacgttgccggccattttttcatattcggccagcgctttgataaaggccagaatcagtcccgtatcctttctctgcgcgaaacgaaaggacggttgcaagttattcattatcggtacctccgtaaataaaatttaatcctgcttatggtttgtgacttagtcacagaacagcggcatttttatatttataatacaatcatcgtagtaataagtccacaataagctaacataacggtttaatatttaagtgaaaggaaatgatgaatcatggcaaacgtaaaagaactcacaaaacagaattttgataaagaagtattaaatgcagaagggggcagtgtcctcgttgatttctgggctccctggtgcggtccgtgcagaatgcagggaccggtagtggaaaaactggcggaaggcggctacagcgtggcgaaggtcaacatcgatgaacagcctgaacttgcggagcagtaccgggtaatgtccataccgacgctcattgtctttaaaaacggcaaggtagaggaccagatggttggcgtacagtcctatcagactctagaaaaggcattgcagaagtaggatacgggaattgcagaaagctgaatgtgtgtaatagaatgaagaaagagacaggagaatactgcggtggcagttcctgtctcttttctttctgccgccttttcccctgtccggtcttttggtgaaaactacccctcggttgagataatctcgtaaagcattttcttatccaggatattgattgtacctctggaaatttcgatgcacccgtctttgacgagaagcttgaggttgcggctcaccgcctctctggcgcttcctatggctttggcaagctgttcctgggtaagagccagcgttgaggaacgctgggccacggattcgtcaatcaggaagaccgcgatcctctgccggagattcataaaaaacatgcgctccacggcagagatgacatcggagaagcgctctgtcatcagccggtaggcaaaattctcaacatatatattgttcttcatcagcgactggaatacggcgctgggaatcagcagcacatcgcagtccgtttccgcctcaatttgaacatcaaaggtgatggcggaaaggatgcaggatgctgacagaatacagatgctgccttccctgagtctgaacatggtggtttcttttccgtcgtcggacagcaggaatgtacgcagtatgccacggcggataatcagggcgcccagacactcatcctcgcctgagtgtacggactggcccgcttcgtaatgcagcaaatgcagtttgtcgattatcagtcttttatcatcatcggagatgtgattccagaatgacagattttttaaatatacattaacatcggttgacgtcatacaaacacctctgaatttaaaaagtcaaagacacaggggccgcatgaacaggctcctgtgcctacccggagaagcggtaatctgcaaatccctgattactgcatagctccggtaacaatactattttgtaacagttcagacagcatgtaccgttactctattttttcttgtgatacagatatctcggtattccgtctaccattacaggggaaacgtctccctggattaatgggcggacatagctgataaactcttcggtcacataagtgccgttcttgttaatccattctctgggaacggttttttcgacattggaaaccttgtgtacattacgcagctccgttgtacactgatacggatcatcggaaatccgcttcaggataaccatctccccggtatcgccctcgtcagcggccttgacggcggcgcctccgacctggaaggcttccaggatatcgattctggatgccagatgggaagcggccctctggagggagcttagctcgatacttcgtgttttgcagccgatttcctgggaaagacggcgcgccagatagttggcggttcccgtcagctgcttgtggccgaaagcatctacgaaatccactccgtcggttaattcgcagacataccgaccgtcttccagacggatcccctcggaaacagcggcaattacgaacggtttcttctcgagcagtttctttacgcgtgagaggaaatcctcgatgtcaaaggcaacctcaggcagatagataaggtccgggccttcacagtcctccccggccgacagagcggccgcaccggtcagccaacccgcattacgtcccataatctcaacaatggtaacaagacctttgctgtaaacgagagcgctgctgtcctggatgatttccttggtggatgtgccgatatatttggcggcgctgccgtatcccggcgtgtgatcggtgagggcgagatcgttatcaatcgttttcgggactcctacgaacttagtcggatatcctttgataatcgcatagtcggaaagctttttgattgtatccatagaatcattgccgcctatgtaaataaaacactctatattaagtttatcaagaatttcgaatattttttcgtaggactcgatgttttcatgaatctccggcagtttatagcggcaggagccgagataggcggccggggtcctctttaacagttctacgtccaaatcggtctcaatatgctccgacaaatcaatatattgttcatttaacaagccttcaatgccgtgcagcatcccatatacttttggcgcccctctgtcgatggcagtccggtatacaccggcaagactggagttaatggctgcggttggtccgcctgactggccgacaattacattacctttcatatgttacccctccaaactttcatgataaaattattatatcagttttatcatggtacaacaagaaaaagtgacggaatattgcttttagagtcaaacttcattataataaaataatacaaaagtattgacacggagaagaagatgctatattctatagaatatagaaggtcttcccgcggatgggagaaataatgctgattaacgaattaccaacagtggggaaaatgcctttgagtgaaaaggtatacagaatacttgttcagtcgattgtggatggtgaacttcctccaggaacgaaacttcaggagaaacatgtggccaaacagatggaggtaagcgccactccggtcagagaggctttcaagaagctggcgggagatggttttattgagattgtaccttattgcggggcaattgtgaaggaactcgacgaggaggagataagggaggcctatcaatgcaggatagcgctcgagaagatggctcttgaagaggccatcgatcgttttgacgacaatgccctgaagcagctcttcgacattatcgagaaggaaaaagaaactgaggggattatggaagtttccagaatcaataaaagtttccatgacgtaatttatcttactgccgacaatacgatgctttgcagactgctcgacatgttgaatacggttattgcccgggatatgaaatattctgccagtgatgaaaagcggaggaatgagatttaccatgagcatgttgcaatagcgcaagctataagggatcaccggcttgagcaggcgcagcaggctatggtgacgcatatccgcaacggccagaaatacatagagagctgccggtcgtcccggaatgaagaaacacctagtccagatacacaataaaaaagaaggaaacttcttttttttacccatataaattctatagaatatagaaaatagaataaaaacaatataaggaggaatcaaaatgaagaagattttaatgtcaagaggtgcagacaaagtggtcagcacctgtgtcaaggtgcagccgggagaagaggttgtcattatcacggaagaatctaaaatgagaatcgcagaggccgtggcggcagccgtataccgggtaggggcgcatcctattctcacaattatggaaccaagagaacaggacagccaggaacctccaagaaccatagcggctgccatgaaaaccagcgacgctttcatttccattgtcggaaaatccattacccatacgaacgccgtcaaggaggcgacacagaacggttccagaggcgttgttctgacccagttcagtgaagatatgatgattcacggcggcatcgagtgcaattttgaggaggcaaaagtggtatgcaaggcgatggcagccgctctggccggttccggtgaaattgtactgacgacggcagccgggacaaacctcagatattcggcagccggcagaagaggaaattccctctactgcatggttgaaaaaggtgaattttccacgattcccaccgtcgaggccaatgtgtcgccggtggagggaacggctaatggagtgatagtggcggatgccagcattccctatatcggaatcggtgttctggatgaaccggtacgccttactgtggagaacggtttcataacttcgatagagggggaaagcaggctgaaatgctaaaagcagatttggcggctaaacaggacccaaatgtctataatatagctgagatgggcgtggggctgaatcctcagtgccgttttatgggatttatgctggaagatgaaggcgtgtatggttcggcccatatcggaatcggaacaagcatcacgctgggggcgttgtgaaggcatcctgccactatgatcttattatgaaagatgcgacgattgtggcggacggaaagactttgatggaagcggggaaagcattggtataattttcagaaggagaaggcagggaggtaataactatgacaattgaattaaatgtatatcatacaatagcaatagcgatcgttattctgattgccggcgaggcaatccgcaaccgggttatggttcttcaaaaatactgtataccggtacctgtagtcggcggcctgttatgtacggttataatccttatcgggcatgaaacgggagctttcgagataaaatttgatatggctttcaaagacttcttcatgctgctgttttattccggaattggttttacagcaagctggaagctgctgaagaagggagggccgcaagtaattatattcctgattatttcctctgtcgtggttgtattccagaacctgcttggagtggggctatcaaagctgatggggattgatccgctcataggccttgccacaggctcaattcccatgacaggaggccacggaacgtcggcagcattcgctcccgttttagaggaggcaggacttgcaaatgccaacacaatttcgctggccgccgctacattcggcctggttgcaggcagcctgatcggcgggccgaccggacgtttcctgatcgagcattaccatttaaagagttccgatgcggcggctgtctccgtgaagctggacgataaagagctgggaaaagcgtcgggcggctcaagtgagcgggcattgaccgtaggggcataccagcttctgattgctgtttcacttggatgtcttgtctcggatttactggcaaaaacaggcctgtcttttcctgcatcggttgggggatgacggctgccgccattataagaaacattgcagacaatacggaccgcctgaagctgagacttccggagatttccattataagcaatatctcgctcctaatcttcctggctctttccatgatgacactgaagctgtggcagcttgcggatctggcagtccccatgcttttgctccttctggcccagaccttgctgatgtttgtctgcgcggtgtttattacatttaaattcatgggaaagacgtatgatgctgctatgattgcagtcggccactgcggtttcgggcttggtgcagttccgacggcaatggcaaatatgcagtctgtggaggcaaaatacggtcaatccccggatgcgttctttattgtgccgcttgtaggcagcctgtttatcaatctggttaatacttttgttattacggggtttgtgaactttttgaaataagatttgattgagaatggaggacgcgtccggaacgggccatgtccggtgtggtgagggggatgtctgagtcttccgtccccggttgaaggtggccgtgagggggaacccggccggaatgaattgaggagggccctgtcgcagccactacgtgtttccggcaaactgatatcaaacattctgcaattccttaataaaggcgcattgaaggcatatcgtatttcccgcatacggaagcactgagtggccgcgacaaggtccgcccccgcacttaacgcgtgagacattcagcggccgcaggccggcggacgggcgatacccttggccttgagtctttcgtcccggcgaaaacctggccttgggcggaggggaagataaagtctgcggatgccgcctaaatccatcgctgattagcgaggtcctgccgagcttagcagcgcgatgcatttcacagagcgggagcgtgctccgcagactttatcttcgcccgcagccccaactcacaacaatcttcccccgggacgaaagactcataaaacaatcccaccaccccatccgctggccgtaccggcggcgtcctcacctgcttaatcaaatccgaattgcagaactgatccggttgtggtatactctattacagttattacctgagaaaacagtatcgggacagatacatagctaatgaggagaagaactatgaaaaaaacagcgcttgtgatcatggcagccggaatagggagtcgtttcggggcggaattaaacagcttgagccggtaggaccgggcggtgaaattattatggattattccatccatgatgcgcttgaagcaggatttgacaggatcgtgttcgtaatccgccatgatttggaaaaggatttcagggaagtgataggagacagaatcgagaagattgcaccggtttcctatgcatttcaggaactggatgatattccttccggatttacggtaccgcaggacaggaaaaaaccgtggggacagggcaggcggtgcttagtgtccgtgacatcgtaaacgagccgttcctggttatcaatgccgatgactattacggcaaggaagtatttaaaaagatccatgattatatgactggcgatatggatgagaatgcaccggtttatgacatatgcatgggaggattcatactggcgaatacgctgagtgacaacgggggcgttaccagaggcgtgtgtgaagtaggggaagacgagattctcagggcggtaagggaaacctataatattatcaaaacggctgacggcctgacggcttccgataaagaaggaaatcctgttactgtaagggaagaccagcacgtatcgatgaatatgtggggattgacgccggcgtttatcaaagagctggagcgtggtttcccggaatttttaagcggtcttaaggaaggggatttgaaatcagaatatctgcttccgacgattattgatcagatgattaaggacgggcgcgccagagtcaaggtgcttgagacgagagaccactggttcggcgtaacatataaagaagataaagaaggcgtggcggagtctatccgcgctttaatcagccagggagtttatccggaaaagctttttcaataaatttccggattggggacagtaaatcaagaaactttggagaaatcctgcatatgataccatataacttcatgccagaaggaggaatgggaatcagatgcaggatttttcgtatgaaagattaagaacgcaggaagcagcattagagccctacatactgtatcgcaaggatcaggctgtccaggcggagcgaaatgtaagaatccgggattttgagtactttaagagtatgtatcccgacagagttaaagctttgcaattagttgtggaagaagtctgcgatgagatggaatacgaagggagcccgatttatgacgagtatccggaccgcattttaatggagcagatgatccaaaagatcgcacagagagcggaggtttccgatgagaaaccggaacaggccgagatgacaacggaagaagtggagcctgaagaaatccaggaaacgcttccgagagtttcctatggtcctgtgcgcaatgagtacggaggaggggaaggataccggacatgggagatggatgagactacccagattcaagaggcaggtccgaggcgcccatggggtccgccgccaccgcctaatccatggggtccgccgccaccgcctaatccatggggcccgccgccaccgcctaatccgtggggcccgccgccaccgcctcccaggccatggggtccgccaccacctccacctactccatgctgcccaccacctcgtccatggggtccgccgccccggcccaggaataattttatgaatgatatcctgggaatccttttattcaatgaactgcagggcaggcgctgccgttccggaagatgcagataaaataccggcggcaaataagatagaaaaaccagctgattattcagaaatacgggaaagcaggaagacttatttggttttcctgcttttttggattatttcatgatacatttggacagagtattttaagaagcagacgctttattacttaagaagcttcgctgttccgtaacagttcagacagcgtaaacgatcttacagttcagtctccggccaagctgcgacaaaatgatgcacagaaacggtaaaaaacgacgtttcgcgccgcataactcgggattttcgcaaaaacggcaaaaacacctcgcgggacacatcatggctgaactgttactaaacggctacgctatttcatctatttctggaatttggcaggggaatatgatatactatgagaacttaataaacttgaaacctgtatcgggaaacattttaatatagaaggaacacacaatatgagaaaaacgataaaaaaagcagttattttactggtaatattcatagcggctctggccgtctatttcatatggtcatccggaaaagatgacgagggcgcagtgtatacatcgatcgaggatgccaatctgccggtcgtttatatggagctgtttggcaggaaaatgaactgtctctacggttttgtcgaggacaggcctacaagtgcaggccgcggagatctgactgtgctgccggaggatcgcagactgcctgttagctttgaagacgtagactcaaaagtgaaaggaatccagtacgaaataagaagcctggacggcgaacgccttgtggaaaggacggtactggaggaatggacgcaggagggaacacaggtaaaggcagtgcttccgattcagaaccttctgtcggcggggaaagaatatatgatgactctggcaatctcgacagaggagcatcctgccgtatactattacacccgcatcatgtggtcggaaaaccaccacatggaggatatgctgaacctggccatggaattttcagataagaccttcagctatgatactgcgcgggatttgaccacttatctggagacagatcccaacgcggataacagttcactggggaaagtgactcttaaaaacagctttacgcagctgacctggcgcggtcttgaaatgaagagagagagcgaggtgtctgtccatctgagagaaatgcagggagtaatgggcattatcgagcttgattacgtaaccagcacaacggatgaggacggcagcagggagttttatgatgtgacggagagcttcacgatgaagtggaacactcagagaatttatatgatgaattatgacaggcgcgtgaaccagattttctccggagaaagcaatctttattcggacaagcggattatgctcggaatatccgactcggaggaactgcagactatgagcgatccgtcggagaaataccatgcgttcgtggctaaccgcgccctctggtgctatgatgcagataaaggaagcagtacgaaggtctttgcattccgcaagagtgaagatgatttgcgcactaatttcaattcacacggcgtcaagatcctttcggtaagtgaggagggcaatatcgatttccttgtatatggatatatgaacaggggaaatcatgagggaacgacgggcgttgcgctttaccggtatgagaatggggataatacactcacagagcggctttatctgccttccggcgaagattactggagcctgcgccaggatatcggacggctgagctacctgagcagcaatcagaccctttatcttctgatggatcatgcagtttatggggtggagctgtccggaaaagaatatatggttgtggccgacgggctgacggaagaaaattttgctgtcagtgcggatggttcccgaatcgcatggcaggatggaagtgatatttacagctctgaaaaactgaatgtcatggatttgaaaacaggtaaaaaggatgaaatccgtttccaggatcagacggtgataagacttgtgggatttgtgggaagcgatctcgtctacggtctggcgaatcccggtgaaaagctgatgacagacggccgcattaccggtttgcctctctacgcccttgagattgtgggcagcacgatggagacggagacgcgctatgagagacagggactttatctgaccgatgtgcagatacgagacagccgcgtgcatatgacaagaatgcgtaaagcgggaggcgactatgagatggtggatgaagacaccctggtctgtaatgaagaagtgattgcggatccgctggcaggaatcggatatcttgcagattcggtcaaagggcgtttgtattttgtccaactgaattcgcaggcggcaaaatcacgtaccatccgggtccatgtgcctaaaaaggcggttgccgaggaaaataatgtgatatccctgacggccaaccatccgatcagcatcagacgttattatgcatacagcggcgggaggatgaacggatcctatgtggattttgctcaggcggtgaaagcggcttatgatgatatgggccttgtcaccgaccagaatggatacgtattctgggttcgggcaaaccgaagtgacgtgaagaccatcaaagatatccagaatgaagtggctgtggtcgagcgttatctggatgaactggcacaggggaatgaagtctccacggatggaaccaggcttgttgatgcgagaggctgtactctgaatcagattctgtattttgtataccgcggccgtccggtggtggcatatctgggtaacggcggctatggtttgatatatggctatgatcagtataatatatcatgtctctggttcccgggacggaatatgcgtattttgacaagatgggcttaaatgatgcggcggcattttttacggataacggcggaaatgatttcatcggtttcctgcccgcagagtaaaaaaaacgacgaaacctttacaaatcctgacgatatggtataatcagtagaaagcggttgttagaatttaagaattctgtaacaatatacattgttttttaatatatattttgaggtgcgaggatggaacaatatattatgaaaggcggcaatccgctggtaggagaagtcattatcagcggcgctaagaatgctgccttggggatcttggctgcatcaatcatgactgacgaggatgtcttaattgagaatcttccggatgtaagagatatcaatgtacttttagaagcaatagaggaaatcggcgccgatgtagacaggcttgatcgtcatacggtccgtatcaatgcaagaaacattaaagaagtcagcgttgatgacgaatatatacgcaagattcgcgcgtcttattatttcatcggagctttgctcggcaaatataagagtgccgaagtaccgcttccaggcggatgcaatatcggcagcaggccgattgatcagcaccttaagggatttcgtgcccttggagccaaaattgaagtggagaagggcgctgttgtagcccatgccattgatctggtgggcagccatatctacctggatgtggtttcagtaggagcgactatcaatattatgatggcggctactctggccgagggggagacaattatcgagaacccggcaaaggaaccccacgtggttgacgttgcaaacttcctgaacagtatgggggcaaatatcaagggcgccggaacggatgtgatccgtatcaagggagtccataaattacatggaacagaatattcgattattccggatcagattgaggccggaacgtttatgtgcgccgcagcaatcacccgcggtgacattatggtacagaacgttatcccgaagcatcttgaggcaatcagtgcaaagctgattgagctgggctgcgaggttatggagtttgacgaggcagttcgtgttgtgggcaggcccaaacaaaggcatacggacatcaagactctgccgtatccggggttccctacggatatgcagcctcagatgactgttacactggccctggcagagggaaccagcattgtgaccgagagcatttttgagaatcgttttaaatatgtggacgagcttaccaggatgggcggcagtgtcaaagtggaaggattttccgcaattatcagcggagtcaggaaactgacgggcgctcaggtcaacgcacctgatttgagggcgggagccgctcttgtgatagccggactggcggccgacggatatacgatagtagatgagatcgggtatatccagaggggatatgagaatttcgagaaaaaacttaaaggtctgggcgcaatgattgagaaagtggattctgaaaaggaagcccagaagtttaaattaaaggtaggttgacaggctgatagcctgatacggtattcgggacagagtattgaatttcggtgtgggaccggaatttgatgctctgtcccgaatttttagtgcttggagatttaactgaggttgggaggacgcgtccggaacggaccatgtccggtgtagtgggggagtctgtctgagtcttccgtccccgtgggtaggttgtcgtgaagggggaatccggccggaatgaattgctgcggggaccgtttgcactctttggagtgcgcagcagtgctaagctcgtgagggacctcgctaagcaccggcggactcccatgtcccctccgcaattgattccgcctactttccctggtcagtttttcgtcggggacggaacactcaggcggaggttttcgacaccggacatggtccgttccgggcgctgattgtctccaaccttaaatggagagggccctgtcgcgaccactacgtgtttccggcaggccgatatcaaatcttccacaattccttaataaaggtgcattgaaatcatatcgtatttccagttcacggaagctcttagtggccgcgacaaggtccgccccgcacttaacgcgtgagacattcagcggccgcaggccagcggacggggccgatacactcagcagagtctttcgtcctggcgaaaacctggccttggggcggaggggaagataaagtctgcggatgccgcctaaatctatcgctgattagcgaggtcctgccgagcttagcagcgcgatgcatttcacagcgcgggagtgtgctccgcagactttatcttcgcccgcagccccaaaccacgacaatcttcctcggggacgaaagactcataaaaccaccccaccaccccgtccgctggccgtaccggcggcgtcctcacctgcttaactaaatctccatatatttctggatatcacttgacataataaagagagtatgatatcgtacatgttgcagttaattaaaattgaaaagtacgtaatatcccttattcagagtgatggagatacaaaggatctgtgaagtcacggcaaccccgtttaagcaggaaggacgataagtccggacggcagggaacggaaggtgccagcctgagcgaggagccggaagaattcggttaatcgagcaataagaggatttgataggctatgatcaagtccgtattgctacggacttttcttttaccccaaaatggccggcgcgctcagtgcggctgccatcaacaatttaaaggaggacaataatggaaaaactactttttacatctgagtcagttaccgagggacatccggataaaatgtgcgatcagatttccgatgctatcctggatgctttgcttgcacaggatccgatgagccgcgttgcctgcgagacagcaacaacgacaggccttgttatggttatgggtgagatcaccacacatgcgtatgtggatattcagaaaattgtgcgtgaaacagtgcgtgagattggatatgacagggctaaatacggttttgactgtgacacctgcggtgtaattacagccatcgacgagcagtctactgatattgccatgggagtggacaaggctctggaggccaaagaaaacaagatgtctgatgaagaactggaggcaatcggagcaggcgatcagggtatgatgttcggatatgcgacaaatgagacggaagaatacatgccttacccgatttatatggcgcatatgctggcccgccgtcttaccgaggtgcgaaagaatggaacacttccttatctgcgcccggacggcaagacacaggtaacggtggagtatgatgagaaaggcacgccgatccgccttgatacaatcgtcctgtccacacagcatgacgaagctgtttcccaggaacagattcataaggatattaaacgccatgtgtttgatccgattctgccctccggaatgattgattccgagaccagattctttatcaacccgacaggccggttcgtaatcggaggacctcatggcgacagtggtctgacaggccgcaaaattatcgttgatacttacggcggatatgcccgccacggcggcggagccttctccggcaaggactgcaccaaggttgatcgttcggcagcgtatgcggcccgctatgtagctaagaatatagttgcagccggactggcggcaaaatgtgaaatccagttatcctatgccatcggtgtcgcacagcccacctccgttatggttgatacctttggaacggggaaactgagcgatcaggaactggtcggaattatccgcaagcatttcgaccttcgcccggccggaattatcaaaatgctggatctgcgccgtccaatctataaacagacggcggcatacggccattttggccgcaacgatctggatcttccgtgggagaagctggataaggcggagctgctcagaagctatttaaataactgaataaataataaacaatgaaacaattgaaccataacagggggcccggtcgtcagaccgggtcctttactgatggcggtgaaccgtgcgcggagcgtgcaggttgccgttgtccggaatagataatattccgggggatgtcctttgctgccgcaaaagccggggatttttgcggatgattctgtatgacagtgccaaaagtaccataaacagggcattttgcaggaaataggatgaatattttataatacttttagaaacgaagctatcaaaatatggtatacttatgattaagaaaatgaaaagatatgagaaaaccgccgaagtttttttgtggtaacactttattccgatgccacgggttttctcatatttttctgactcctgtgagggagtgctgcgggaggatattacatgaagatcaaaacacgtcttgcaattgcatttatcacaattaccgtagttcctatcgctctgatatacattgccgtaatgggacttgtaaattatcagggccgttcttttcagaagaactacggcctgaatgagcaaattgatctgctctccggcaattccatgcaggtattcaaccgtctgacacagggagtttacaatacaatccggaaggcagtggatgaggatccggctgtctttgacaatccggagtatctggaatctttaaacagtgagctggagaagaagtactcctatctgattctgagaaggggagacgagattgtcttttccgggtcggaagaggggtatgagcttgcggaacagctctctccctatgatgattataaagccaatgcgtccggcggtttttatatggacggagaggagcagcaccttttaaaacagattgatttcaagtatactgacggggaacagggcagcctgtttatcgtgacgaatgtcggcgattatgttcccgagattaagaccatgatcagtgagatgatgctggtgggcgtactgattatctgttttaccgccggaatattgattatgtgggtatacagggcgctgctgcagccgctgaataagctgcaggaggcaacgaagcagatcagggacggcaatctggactttaccctggatgtggacaatgaagatgagattggcatgctctgccaggatttcgaggagatgcggctgagactgaaggagtcatcggaggagaagctccagtatgataaagagagcaaggagctgatcagtaacatttcccatgatttgaaaaccccgattacggcaatcaaaggatatgtcgagggaattcaggacggtgtggcctcatcgccggagaagctggataaatatattaaaacgatttataataaagcgaatgatatggatcgcctgattgacgagcttaccttctattccaagattgatacgaataagataccatataactatacgaagattaatgtggcagaatatttcggtgactgtctggaggatgtggggctcgacatggagaccaggggtatcgagctgggatatttcaactatgtcgataatgatgttatgatcattgccgatgcggagcagatgaagcgtgtgattaataatatcatcggtaattccttaaaatatctggacaagaaaaaaggaatcattaatattcggattaaggacgacggtgattttatccagattgtgatagaggataacggaaaaggcattgcggccaaggatctgccgtttatatttgaccgtttttacaggacggattcctcgagaaattcttccaaaggcggaagcggcatcggcctgtcgattgtgaaaaagattatagaagatcatggcggcaggatttgggctacgagtaaagaaggaattggcacggaagttcattttgtgcttagaaaataccaggaggttattcaggaatgagcagaattttaattgttgaagacgaagaaagcatcgcagagctggaaaaggattatctggaactttccgggtttgaggtggagatggagaacaacggggaagcggggttaaagcgcggcctggaagaagattttgatctgctgattctggatctgatgcttcccggcgtagacggctttgagatctgcaaaaaggtacgggaagtgaaaaacaccccgattattatggtgtcggcgaaaaaggacgacattgacaagataagaggcctgggcctgggcgcggatgactatattacgaagcccttcagccccagcgagatggttgccagagtaaaagcccatatggccagatatgaacgcctgattggcagcggaacacccgagaatgagataattgaaatcaggggactgaagatcgataagacggcaagacgcgtttatattaacggggaagagaagaattttactacgaaagagtttgacctgctggcattcctcgcccagaatccgaaccatgtctttacaaaggaagagcttttcagcaagatttgggatatggaatcgctgggagatatcgctacggttacggtgcatattaaaaaaatcagggagaagattgagtttaatacggcgaaaccgcagtatattgagacgatttggggagttggataccggtttaaggtttaatgtacgcccatgaggaaataaacgataacctgtacgccctgcgcactggtcatcgccttcaataaaggaggatactgcaaagtcagcattagctggttttgcagtatccttctttttacagtataaaacggaaaagcaggttccggaaaacctgtaatacatagttcaagtctgaaaagactgtttcgattgattccaattgaggaaacagttcactgctaaacggtatattattttttaggaagaatctctgataattgattaatatattgaattgcatcctgtctgccatagttggtatgttcagctatagcgtcgctgtcctaatgcgtctcatctgccggagtggaaaccttatgaatcggggtgtttcaatttatgacgcttgatgaagtgtgcgggatgaaggacatgggagaagataaagcagtatatagccgaataaagtattactgcagttaactggggtcagaaagcgaatcaggatatttacacaaatacgattatttcaagtacgggaaaaaaccggatagaaactcatgaatgagctgatatccggtttttgtatcgtttctattccttcgacaactcgtttttcaatatcttcgcgagttcatccggcgcattttcgtgcatcacttccctccaggcggacagaagattctggcgttccacgatacaggggatatgccgatatattcatatcccctctggttcagcagggctttggctgtggcctggcccgccgcgacaccctggtcataagctttctgggcgctcagcccaaggatgatatcttcgttggcaagaatcccggcaatctcataatccaaatcaaaggttacaatctttatatcgcagcggttcagctcgcgcatcgcccggattgcaccaagtgcagggccttcccaggaaacgtaaagccctttgatttcgggatgggcgaggatcatttttttggccacctcatatgcgttttcaatctgataaaatggttctgattccacgatggtgatattgggatactcctcgcggattgtctgttccgcaatcatgtcccttaggtaggttcccaggaatttactgccgtgtacgataaatccgacgacgactttatcctcttttttaaaatgttccccaagcagtactgctccgttgcggccgttttcgcgttcattggtggagacgagagagtaataatcgcccttgctcataccgtccgggacattgctgataaagataagttttgtctctttggagagctggcggaatttgttggaggtcgcggtgtcatccacagggattgccacgatagcgtcaacaccctgcatccgcaggctctccagctgaattgcctgtaaattcggatcaaaatttgagtcggtgacggatacgatgttgacaccgcacctcgataagatataacggaggcccttttcgtgcatggccgcccaactggtattgccgtaatgaaatgagacgccaacccggtatttatgttcctgcagttcttttacttcggcgggggtcagatccaggttgtcgggtgaaacagtcgtctccccataaggccccttgccgatcatcttgaccgatttacggatttcaagcagcgacgggatatgtacctcctctacctcggtttttccgtcgatttggttaaaaagcagcctcagcgcattttccgccatcttgtggcagtcatgggaaaaggtggtgagaggagttccgaacagatggcaccaggactcatcactaaaaccgataacggacagctggctcggaatatcgaccgccagcttttggagcgttgatatcagaataagggttatccggttgccgcaggcaatataagccgtaggttcgaagacttcatagtggctgataatcgcacgttcacagtctttgttattgtaaagattcattttgacgatattagagtcatcacagtgtacgcctgcatcatacattgcatccagaaatccggtaagctgctcgttgactgttgaaatctccctgtccgacataagaatgccgattttcttatggccgctgttaagtaaggtctgcgttcccttgtaaatgatgcttttgctgtcggccacaacgcaggatatggagtggtccgacacggtccgttcgatacagaccaggggcatattcctctgtcggagcttttgataatacttactgtcaagtccgcagggggcaatgatgattcctgcggtctgcctgcttccgaccagattttccagtatccgtttttcagatgcggcatcatcaaaggtcaggtaaatggaaacagagtatcccctggactcgcacagctgggtgatacatgtgattattttggtaaacagggagcctccgacatttgggattacgaccgctataacggatttttctcccaatctggcagtgccgggcttcttctccgcttttacctgataattcgtattccggatggcctgcaatactttttccgtgagttcgggcttaacgtagcgcgtgccatttataacatgtgagacggttgctatcgagacgccggcttctctggcaacatctttgatggtgatagccatataaaccctcctgcttttacgtaaatttaactatactataacaatttctcaaaataaagtcaaattctaaacgtaaaacagcagaattactgttcaggttttataaaatttagaaagtaaaaatggaggaaattggtaatatattgccttaatttacgtaaatattgatatttaattaggacaatagcataaaatccacaaaaaaatcctgttaaaaatgcagaaaattataaaaaccgttgactctgtgagcctgcaatgataatatttacgtaaacaaggcagcgcgcaagcttgatgaagaaaagaaaatatagcaggaatcgtaacagttcagacagcatgaattgctgcaaggaatcaaggaaaagcagcaaaacagtatttaaagcaggctagataaaagaggaggaaatcattaatgaagaagacaatcgcaaaagtaatggcattcacgatgctggcagcaaccctcgcaggctgcagcaattccaattccggaagtacaggaagtacaggaagtacggcagctccggataagacacagacagaaggcgcggcatccgaggcggcagagacaaaagaggaaggtgccgaagcggcatcttacaagtttgcttttcttccaaatacacagaataacacattccaggctgcaatgaatgatacgttcaaaaagctttgtgatgaaaagggatacggttatgtgtgccttgacccggattacgatttgaatacccagttatcccagatggccgatgtggccaaccagaatttcgatgcggtatttgtaattccggttgactctgcgggaatcagacagggcctggagcagatccatgagaagaatattccgattattaatgtagacactccggtaatcgacgatgatctggatttggtagaaaccgttattgcaacagacgcttacaatgcgggaacattgataggacagcagatggcggccgactatccggacggtgccaaaattgcgatactggatttcccttccaatgaatcctgtgtaaaccgtgtggcaggtttccttgacggacttggcgatgcaaaagataagtttgacattgtggcccagcaggacggcgcggcggctctcgatatctccatgccgattgcggaggacatcatccaggcaaatcccgatttaaatgcatttttctgcattaatgacccgtctgcactcggtgcggcggcagctatcaaggcttccggcaagacgggaatcggcgtttactccatcgacgcatccccggacggcaaggcagctattctcgacggctcctttacggccgtggcggctcaggttccgatcggaattgctgagactgcatttgaaaaagcagaggagcttttagcaggcggtgaaatcgagaaagaaattctgttaccttccttcctggtagataaagagaaggcagaggcaacgctgaaagactggcagtaagagctggtcgtcataagagttaccagagcgtgtttgaaaatttccagctgacggaaagcatttatcaaacacgctctagacatggcaggcgcttcttataaacagaagtgcctgttttcagaaagtactgttcataccatgccaaaaagcggcgtgctgtaaagagtaacacgctttgcgatgcacagaaacggcaagcgccgttgattatggtgaaaagtttacttttcatagcgccgcgccgtgtaacccgggattttcgtgtgaaatgcacacgaaatacctcgcggaatccaaccgtgtgaacagtaactcagaaatgcaggtgagagagtggaaaacattgtattaaagatgacggatatacaaaaaagcttcggcggtgttcatgctttaaacggaatccattttgagctgagggaaggggaaattcatgctctgctgggagaaaacggagcgggaaaatcaactttaattaaggttttgggcggaatctacaggccggacagaggaacaatcaatatcggcggaaaagatgtggagatggataatgtccagattgccagagagcatggaatcggaatcatccatcaggagattgtgcttgtcccccatctgaccgtggcggaaaatatcttcctgggccgtgagattctggatcggttcggattcaaaaatatgggggaaatgctgagacaggcgcaggagatgcttaagaagctgggactggatattgacgccgatacaaaggtggtggaactcacgattgcccagcagcagatggtggagattgtaaaggcaagttccttcaatgtaaaaatcctggtgatggacgaaccaacctcatctttgtcggatgaagaggtggaaaagctgtttgagacaatgacaaggctgaaggagcagaaggtaagcatcatttatatttcgcacagaatggaagaactgttccgaatgacggacagaatcaccgtaatccgggacggcgcctacgtaggcactgtaaatacgaaggaaacggatacagatgagctggttgcgatgatggtggggcgcagccttcagaattactatacacgcgactacgatacgctgaaagaggaccgcgtggttctggaagtggagaaccttacgaaaaaaggagtttttgataatatcagctttaaagtcagggaaggggagattctcggctttgccggacttgtaggcgcaggccgcagcgagattatgacatgcgtattcggcgccgaccggtttgaatcagggcgtatcctgctggaaggaaaggaaatccggttcaaaaactgcctggaagctatcaacagcggtattgccatggtgacggaggacagaaagaagacaggtctgaccctgattaattccattgtgtttaatacgaccctctcaagcctccggtattacgcaaagggcctgcttctgagcgatgcaaagaaagaagaggttacgcaggagtatattaagagcctgaacatcaaggcgctttccccggatgtcccggtgggcagcatgtcgggaggaaaccagcagaaggttgtaattgcgaaggcgctggcgaccaaacctaagatactgattctggacgagccgacaagaggcgtggatgtgggcgccaaggcggaaatatattcaatcatcaatgaactggcaagacagggcatggcaatcatcatgatttcctcggagctgcctgagattatcaatatgtgcgataacgtttgtgtaatcaaagaaggcgtcaaaacaggggagattgatcatctggaactgacacaggaaagaattatgaaattggctacaggagtgtaaaatatgaaaaataacagttttatgaaaatgctgaaaggcaactctggaattattgcagtactggttattatctccgtgatcctgagctttgcctcaccggttttcctcacaacggataacctcctgtccgtactccggcaggtatcaaacaatatgtatctggctctcggaatgacgctcgtcattattctggggggaatcgatctttcggtgggaacctgtgtcgccatgtgcggaactctgacggccggtctgatggtcaaccagggaatgcccatggttctggcaattgccgtgggactgcttctcggaacactggccggatttctcaacggacttatcatcgccaccttcaaggtgcctgcatttatcgtgacgatgtccatgatgaacgtggcaaagggcgtggcgtacatttactccggcggccgttctatccgcgtttccaacgacgtgtttaccggaatcggaacaggaaagctgttcggcgtcctgccgctcccggttgtgtacatgattgtactgattattattttcattgtagtcttaaataagacaaaattcggtacatacatatttgccatcggcggcaacagagaatcggccagactctcgggcgtcccgattaagaaagtggaaattgccgtgttcactatttccggatttcttgcggcgtttgctggtattgttctctctgcaagaatgtactccggccagccgggggtcggcgagggctatgagctggacgccatcgcagcctgcgttctgggcggtatatcgatgacaggcggcgtcggagccgtatcgggaaccatattcggcgccctggtaatcggtattatcagcaacggcctgaacctgatcggactcagctccttctggcagcttgttgtgaaaggtttgattattgtcctggccgttattatcgacacccagaagggcaaagacagtgttgtaaaaagaatactcagaaatgcgaaggagagagcataagacatggatattttcaggaaattaagctgggctgactcaacgggagatgcaattccgctttatcatgacggcatctatcatattttttcactgacatcgcctccgggaaccacggtgtatccggcaagactcaggacgacatgggagcattccatttccagggatctggttcactgggaggaagtgggaaccgctctttccccggggaaggcgaagaaccggatgcctgcggcgtgtggaccggcgcggctgtgtatggagaaaaacaataccatatcttctatacgggctacaattacaatgttcacttccagcagacgatctgccatgcggtcagcgatgacggcatccactttgaaaaggacccgaaaaatccgattatcataccgaatgagaaagagtatgaggtggtagactggcgcgatccgtatgtgttttacaatgaggatgataattgctggtggctcctgatatcgggaaggaagaaggaagggccgccttccagaagaggatgcattgtattgtaccgctcaaaggatttggacaactgggagtattatggaccgatttaccagccgtatcataccaactgcccggaatgctgcgaaatgtataaaataggtaaactttggtatctttcctattcccgcttctctgagttcgtcaatacgatttaccgtgtggccgactctccgttcgggccgtggagaacgcctaagatggatggaataggcggccgccgtttttacgcagcaaaatccctggtcaatgacgaagggcgcagattctatttcgcctgggctcatgacagggcgcagcagagcaatttcggcgagtggtactggggcggccagttctgtattccccatgaggtctgccagaatgagtccggcgagctggatgtgaagctgccccgggagtatgtggaggcgtggctggagccggtggaatggagctatgagcataagcttggaaaattccggacttatggggataaatgcatttatctggattccgtcagcacattatcatatggctttataaaagtgaaagagaagagcttccttttcagctgcaaggtaaagccggtggacatggcggatcatttcgggctgctgctgaaatcggacagcgacgccacacagtgtattgtccttgcctttgataaaggaatgcagagggcggagcttctcaatcttccgatggaggtggatccgttctgggaagcttcctgcaccaatatcggcattccgaaggatgcgggcccggacggcatcagggtatgcgaaaaaccgtttccctataaggacggcgatgtgatcgatatcaaagtcgcaatcgatcaggatatgattgagattttcgcaggcgaaaagattgcgttcacataccggtactatggtgatacggagtatcagattggccttatggcgcaggatggatgcgcagaattttttgatatcagagtaacggaataacgggaaaaatacgtaacggttcatgctgcatgaaccgttacaacaatacgggagaatcatatgcgggatatagatgtaattgccctcggtgagctgttgattgattttatccagaacggagagacatctcaggggaatcctctgtttgaggccaatccgggaggtgcgccgtgcaatgtgctggcaatgcttgccgggctgggaagaaagacagagttcatcggaaaagttggccgggatatgtttgggaggcagcttaaagaagcgctcgaggatgtgggaatcggcacctgcggactcagggaggatggaaaagtgccgaccacgcttgccctggtccacaaactggataacggggacagggatttctctttctacagatctcccggagccgatatgatgctgacaccggaggaagtggacggggatcggattggaagagcggaaatttttcacttcggctccctgtccatgacggatgaaccggccaggacagctacgaaaaaagcgctttgggcggcagagaaagccggtgtcctccgttccttcgatccaaacttgaggccgcctctctggaaatcgctagatgaggcaaaggagcagatttgctatggactggcccattgtgatgtactgaagatttctgataatgagattcagtggcttaccggaagggacgattttaccgaaggggtaaaaaaacttaagaaagattatgatattaaacttatctgtgtttccatgggcaaagacgggagcagggcctattacggcgactgtattgcggaggtccccggattcattcgggaagacaccattgagactacaggtgcgggtgataccttctgcggctgtatcctccactttattttgaaatacggcctggacagcctgaatgaagcccggctcagggaggcgctccggttcgcaaacgcggcggcctcggttatcacgaccaggaaaggggcattgaaggtgatgccggaggcggaggagatagagagaattatatttaattaagcaggtgaggacgctgccggtacggccggcggacggggcggttttgtgagtctttcgccccaaaggcagattgtcgccaggccgaaagactccgccagaggtatcggccccgtccatcggcaaggttcccctccccattgaggggggagacaatcagcgtctggagcgaaccggggccggtttgcgaaaacctccgcctgagtcttccgtccccggcgaaaaccggattccccctcacgacaaccttcaaccggggacggaagactcagacatactccctcaccacaccggcccggtccgttccggacgcgtcccccattctcaataaaattaacaacggatgattaacatgtaagaatctcttaaggtgcagtatgttgacaattattaaaaattaaagtaatatcggactgattgctctaattacgagaacagtaacataacaaggttgacatataagaggatgcacggatatgaagacagattcaggcggtagggattataaaagcaaatatacggaaaaaagcatcaccggaaggaaagcagacagagaatacaaggcacagccgtacattgcggccggcatatccgggcgcggcggtccggttaccgtcctggaacgtctctgcactgtctttgttcagttcctgttcggcgcggtgcttttatttcttatagccataagcgccactgtgacgtgcagcgtgtacggaggagaggagaaggtgcagtacggcccggaccagcccgttgtccatatactcctgctgattgtttttctggcagccggagtgtggttttaccggaaacggagaatcggagcggacagattcagtctgacggtcaggcagtaccgcaggcttatcatcgctgttgccggattttacctgatttggctgctgataacgatgtactggccgaattctgatcagagaatggcgatggagtctgcccgttccctcctgtggggggattattctccctgggatgcggtgggctttgtctatgcttctccgatggttccgctggggtatgcttatacatatccgtcccagaacggcctgattctatttctggcggttatcgtaatgattttcagggaccttactccgtatgcggtccagatactgaatatcggatttttattcggcggagtatattttctcagctgtctggcggtccggttgtttggtctgaaaagcatccggggcattttaattctgacattcgcatgcctgccctttgctttctatattacgtttgtctacggtactatgccgggattctgtctttcctcagcagcactgtattttgtatacagatatattgagacagagaagctcagccgtttttttattgcagctgtcacagccgcagtttctgttcttctcaaatcgaattatctgattgtattagttgcattggttatctaccttttatcggagggggtattccggagaaaggccaggttcctggcggcggctgtactgatgattctggtttatatggggagcggacgtctgatgaacatggttctggagcaggcgaccggcaggccggtgtctgggggaatcccgatgactgcctgggttgagatggggcttcaggaaggaagccgggggccgggatggtataacggttataatgtcagtgtttttgccggaaacgatgatgatacggaaaagacgaaagaggcgatccgggaggatttgatggataccataactcagtttgccgcacagcctgaggaggcggcagattttttcctgagaaaggcccagtccatatgggcggagccaacctttcagagcctgtggatacaggaggtgaagggaggctcctggctccttccgggcatgacggattccctcctaaaggaaggggggctgctgaaccggctgtatctgggcgtatgtaactggttccagacctttatctatatgggagcatttctgtttctcctgtttgcgggcaggaagctgagatgggagcagctcatcccggcggtgatttttatcggaggctttctctttcacatggcatgggagggaaaggggcagtatacaatctgctactttatcctgctgatcccgtatgcgtacgcagggtttggacagaccattcaatggctggccggctcccggggcggacaggaaacgggcttgcacaaaacaatctgacggcagttacagagaatagatccactttgcattccggtagaacacgttatcccagtgtttttccggaatgactgcttttgtgaatccgatataatccccgtaattggcaagaggccagtcggttccaaacatcagtttatcatagcagtgcgcgtaggctatccatgttttcagagcgtccacataacctttctgttcttctaaaagctccgccagtacgagcttgccttccagaaggccggataaatccgcagctacattttcattcttttcaagaacggcggcggcatccatcagccaggggttcccaaagtggcacatgatgaaccggacgtcaggatgcgttacggccacctcatccagggtcaggggatggctgtatttcaaaaatgcgttggaaccggcagtctggcccatatggacggcaaccggtttaccgtacgtttttgccagctcatagatcgtctcatatctggcgtcgctgatataaacggggctgtagcccggatagagcttgatgcctgcgcaggcatccctctgcagatgctgttctatcatatcgtgggcgtctgatatgtcgtgatgtttcaggtaatggctgtcgattccgatgcaatagtgcagaaaatcgggataatcatgttcggcaaaggaaagtcccctgttgcccatcacgacgcctgtctcgatttcgtatatctggtactgctcccgcagatgttctccactattgatatgctccgctcttgccgcgatctcatcaaaatagggagagccggggcaatagtgcagatgtgagtcaataattttcataatatttctccttccgtgaaatcaggctatattttatacaatgcagtgtgataaccggtttagaacctttcagggtaaacggcggcttggattctgtcccgttcgtcctggccgtcagtaatacttcttatgattctaatatcggtctgggcaattgtcaaataaaaatccacaattgacaaggtgcaaaagatctgctatagtttataagatatagttaaagtgagaagattcaagagctgagacgtttcttgaatcttcttttttgaagttgtaatcaggaaagggaaagaatggaagcaattaagttcgaagatttaaatttagatgcgaagattttacgcgcagttacagatatgggttttgaagcggcatcaccgattcagggccagtcgatcccactggagcttgaaggtctggatatcatcggccaggcacagacaggaacaggcaagacggcggcatttggtatccccttcttcagaaggtagatccgaagagtaaaaagttacaggcgattatcctgtgccctacaagagaactggcaatccaggtatccgaggaaatcaggcgccttgcaaaatatatgcacggagttaaggttcttccgatttacggaggacaggaaatcggaagacagatacgttccctcaaggacgggattcaggttatcatcggaacgccgggacgtgttatggatcatatgcgcaggaagacgctgaagctggagcatgtacacacagtagttctcgacgaggcggatgagatgcttaacatgggattcctggaagatatggaaaccattttgagcgaacttccggaagaacgccagactgtgatgttctccgccacaatgcctcccgctatcgcagagattgcgaagaaattccagaaggatccggagattgtaaaggtagtgaaaaaggaactgacggttccgaaggtgacacagtattattatgaagtaaagccaaagacaaaagtagaggttatgtgccgtctgctggatatgtatgatccgaagctctccatcgttttctgcaatacaaaaagacaggtggatgatctggtgcaggagcttcagggcagaggctattttgccgaaggacttcacggtgatctgaagcagatgcagagggaccgtgtcatgaacagcttcagaaacggcagaaccgatattctgatagcgacggatgtggctgccagaggtatcgacgtagacgacgtagaagccgtatttaattatgacattcctcaggacgacgagtactatgtccacagaatcggacgtaccggccgtgcaggcagggaaggtaaggccttcagcctggtagttggcagagaagtatataagctgagagaaatccagcgttactgcaagactaaaatcattccgcagccgattccgtccctgaatgacgtgacatcgattaaggtggagaagatcatggacagcgtggaagagattatccgcgatagtgatctggataaaattataaacatcgttgagaagagagtgctggaggaagactatacaacacttgatctggcagcggccctcctcaagatgtccatgggtgacgactacgaagatatttcggttgagagaacgcctctgcgttccctggatgaactggaggattacgagcggggcgcaaggagcagaaacaacggacgcggagccagatcaggcagccgcggcggcagcgagaatgttgcccgtctgttcattaatatcggtaagaaccagggaatcaaaccgggagatattctgggtgcgattgccggtgaatccggaatgccgggcagaatggtcggaagcattgacatgttcgataaatatacctttgtggaagtgccgagagagcaggccgacgtcgtattacaggcgatgaaggatgtcaaaattaaaggcaagaatgtccacatggaaaaagccaacaggaattaataaagcctgtgattacagatacacaagaaaaacttcgggagaaaatgcccgaagtttttttgtgttgaaggcggtgagctgtgaaaaaacttacgccgcctgcccgacaaaccgcttccggtcaaaaaccaggcaggcaaaatggctgtggtctgccatctccggcacctcctttgcataatctgtgagttgtaatttctggctctatactatcatattcggacaagtcaatccagccttttcccctgccaagccttccttcctgaaatctttgtttcatctttagaaattctttggtttttcctccgacccggctttagaatcgccatgtatactaatatcatattaaaaaaggagctgaaagggggaactgacaaaatgagtgctgaatattttacagaggcggcggtatcttttattgcatgtgtgacggtttttactattttccttaattttctcttacttgctgcggaggaactgaaaaaatgtagtataataaagagaaaaaagaaaaattacgcggtggtaagaccttccggccggatggttctgcaggggccggacagagtgatgggcgcctaggccgcatgtaatatggagaggacgaaatggaaatacagaacagagcaggagaaagccggattttactggttgaggatgacaaggaaatcagggaaggaattgagattttcctgcgcggacagggataccgcgtatttcaggcggccgacggagtggaaggacttgagatacttgagagggaggagatccatctggcaattgttgatatcatgatgccgaggatggacggagtgacaatggtcatcaggctcagggagcattatgactttccggtaatctttctgtcggccaaatcggaggaagtggacaaaatcatgggactgaatatgggagccgatgattatattacaaagccgtttacgccgatggagctgctggccagagtgaactcccatctcaggagatataaccggtttatggctctgctgaacaggaaggaagaaaaggacggcggggagaacagcaatatttaccggattggcgggctggaacttaatgaggatactgtggagcttatggtggacggagaaccggcaaagctgactccgatggaatttaagatactctccctgttgatgaagaacccgggtcatgtgttctcggctgacgatatctatgagagagtatggaacgaacgggcaataaacacggatacggtcatggtacatgtacgaaatatccgtgagaaaatagagttagatccgaaaaaaccaaaatatttaaaggtggtgtggggcgttggatacaaaattgagaaattaccatagaatgggagtcgttctggtgctcctgacaattatcgcgatgacggcggctgtgatggcctcctacccgtggcttaaggaacaggcatttatgaatgcggaactgattacgtctaattctaattatgacgtttatgaaggttactggatgacgataaacggcgatgaatatctcttccataatttttggaagtttgaacagatagtagcctggatgctgctgggattttctttcctgacggccgccgtcgcatttattacgggtcttattaagccccttggaattacggaacggaagttcttcgcgatgccgtttgagcttctgatattaatcggcggctgtgcgctggcatttatgtcggaaggcggatatcttgtaatggaggtggtggccgggactgtcacaggcgtgtttgccagtgaactggttcgggagctgaatttcagctaccagcaggcatacggcatcctgatggccggcaacgctgttatgtgggcagtaggcattacctttatatactggtttgtcgtatctctggattccatttttacgatgggcctgacacggtggctgaaggaacgtacaattatcggatggctcctgatgggaggcaagaatgcggtagaaaaaacgtgcggtctggtcggctctgtagatttcagggataagcagacaaagcttctgttaaaaatcgtaggcattaattttgtcctgctgaccgtgataagctgcttctggttctttgggattttcggacttatgatttactctgtagtcctgtttttcatgctcaggagaatctatgacgggatgcaggagaaatatgagatactgctgcaggccacgggaaagatggccgacggcaacctggaggttgaaattaacgaggatttgggcgtatttgaaccgctaaagggcgagattacaaaaatcagaaacggattcaaaaaggccgtagaagaagaggtaaaaagccagagcatgaagacagaactgattacgaatgtctcccatgatctgaagacgcctctgacggcaatcattacttatgttaaccttttgaagaaagaggggataacggaagaagagcgccggaactatatcaggattctggatcagaaatccatgcgcctgaaaagcctgattgaagatttatttgaaatcagcaaggcgaacagcaataatgtgacactccatcttgtcgaggtggatattgtcagcctgatgaagcaggtgaggctggagctggaggacaagataggacgctcacaggttgaattccgctggaacatgccggatgacaaggcggtgttgattctggacagcgagaagacgtaccgtgtgtttgaaaacctgctggtaaatatcgtaaagtatgcgctgcccggcacacgcgcctatgtggagattacggatgacggtgagactgtcatggtttccatgaaaaacatctccgctacggagatttccctggaaggcagggatattacggaccggttcgtgcggggagatgaatcgaggaatacggaaggctccggccttggtcttgcgatagccagaagttttgtggaattacagaagggcacgatggaggtgggaattgaagcagatctctttaaagtaaaaatcgaatgggacaggaatagaatgccggataaagcggaagacatgtttgtcaatgaagcggaatagagaagagataatcgaaaaaataaagatataagatgtaaaagaatgttccaggccggtgtcagcggcctggaacattctttttacttaaaattattctatttgtccggcagattactgttcacactccaatgtcagttaatcaaaatggagatttagttaagcaggtgaggacgccgccggtacggccagcggacggggtggtggggtgtgtatatgagtctttcgtcccgggtgtgtttgtcgtggtttggggctgcgggcgaagataaagtctgcggagcacgctcccgctctgtgaaatgcatcacgctgctaagctcaacaggacctcgctaatcagagatggatttaggcggcatccgcagactttatcttcccctccgcccaaggccaggttatcgctgggacgaaagactccgccaggggtatcggccccgtccgccggcctgcggccgctgatagtctcacgcgttaagtgcgggggcggaccttgtcgaggccactcagtgctaccgtgtacgaaaaatacgatatgccttcaatacgccttttataaaaattgtggaggatttgatttcagcctgccggaaacacatagtggctgcgacagggccctccccatttaaggttagagacaatcagcgcccggaacggaccatgttcggtgttgcacgaatctccgcctgagtcttccgtccctggcgaaaacctgaccggggaaggaggcggaatcaattctggaggggacatggaagcccatccgtgcttaatgaggttttttcgaatttagcacggctatgcgcttcgaagagtgcaaacggtccccgtaagaattcattccgaccggattccccctcacgacaaccttcaaccagggatggaagactcatccatcccctcaccacaccggacatggtccgttccggacgcgtcctcctaacctccgttaaatctccatcttgcttaattgacattgggtgtgaacagtaatcccggcagcggcagcggcacaggcgtacaggtgcttatactttctttttatgaacaggcatggtaaaatacagaaaaacaattgaaggatgataaaccaatgatgaagctgcgcacaaaaatcacattgctggtatgttcagttgtaatagcgattttgctgctgaaccagtatccggtatctatgagtctgaagcaaacggtcatgaaggccggtgcctctgctctgatggatattacaacccagttatcgagttccctttcggcggctgacggagatttccgcaaagatacggcagttctgagaacattggcccggcaggcagaggaatgtacaaattgttccggtgtcgctattttcgacgataaattccggcttctctacagcactccgggactgaagccggacgagacggcgttaaagaaatataaagatgagcttctccaggggaaaaagcagtatgatatcgtttctgagggaaaaagcgacagcctgatttatgctgcctgtcccatttacaggtcagacggcaccttacagggaagcatactgtcaacgctgcagtattcgtccaatcatagagagctgcaaaaggcacagagggatttaaacgcgatgacggtgctggtaatgctgattgcactgatttttgtctgggatctgacggacaatgtcaagggaaccatgttcaatttggaaccggtggagatagcacagcttttggttgagaggaatatactgattgacgctgtacgtgacggaattctttctgtgaatcagaacggagaaattactcatgcgaaccggactgcccgtctgatgtttgaaaaagcaggccagccatttgatgacggcgatgccggctttgtgacattgttcccccaattttcactgcagaatatattgaacgggaatcagccgatttatgataatgaacgcaggctggggaccgacagcttttatgttaattttattccgattaaaatctcacagccgcagcacgaaagcctgctggtaaccttccgccccaagcaggaagtagtccggttcgctgaaaatattaccggagtaaaaagctatgttgaagcactgcgggcgcagatgcatgagtttaataataaactgcaggtggtttcaggcctggttcaggctcaaaattacacggaattggaaacctatattcacggtgttgtgcatttgaagaacagggagctgcagcagatcagcggcaaaatcggggatcctacgctggcggcatttctggccagcaagtttgacagggcctccgagcagagagtcgatcttgtacttacggatcgtaccgaactgctagggcggctgacggaggagcttttgcaggatctgattctgattgtggggaatttgctggaaaatgcttttgacgctttgcagggatgcgccatgaggacagtggcgctggagattgtggagaccaccgaggaaatttatatctctgtctgggactccggtccggagattccggaaaagctgcgggagaatatcctggagtatggagtcaccaccaaaaaggacggaaacgggatcggcctgtttttggtgaatcaggcctgtgaacgttataacggatatattacaatagtcagcgaggcaggggatggaactgaatttaccgtacatatcccccgcatgagggaggaggaaagacatgtaccgggtattgattgttgaagatgatccgcaggttgcgcagattaattctgattttttagaacagtccggttttgagatcgcgggagtggccgcgaatgaacagcaggcgcaggcgctgctgcgtgagacgcagatccagatgattctgctggatatctaccttcccgggagcagcggtttgcatattcttaagcagatcagggcggaaaaccggcaggtggaggtgattattatttcagcggccaaggacagcctccaaataagggaggcatttcggctgggatgcctggattacatcatcaaacccttttcctatgaacgtttaaatgatgcgctgaaaaaatatctgcagaaaatgcagcttcttcaaaagaattttctggaacaaaaagaggtcgatttgctggcatcccatcagccggccgaggaggaagagacatctcccaaaggaattgacaaatcgacgctgagcttggtctgcagctgtattttagcggtagaaggctggttcggagtacaggaaatttcggaagaggcgcatatttcgagggtatccgcaaaaaaatatctggattttctttgcggacagaaactgctgcagcaaacctatgtttatggcaacaagggccgtccggctaacctgtaccggcttacggcagcgggagaggccgctctgcaccggcaaaagcaggattgacttccatttagtttaatttaaaaaagcaaaaataactttcataatatttacaatttgccgaaatgcgctatgatgagactatcagcaggagaaacggaaaggagcacttgggaatggcccgattttacaatctgtgtgaacgtcgcttccagttaggacagaataagaccagtatacgtacggaaattctggctggtgtcacaaccttcgcaacgatgtcctatgtgctggctacggttcccaatatgctgagcaatgccgggctgcccaaaggagctgtcctgacggtactgattataatgatttccgtttgcagcatagccatggcgctatataccaaccggccgttctgcctggctccgggaatgagttctgtggctatcgtcagttctatttttggagaagcagggataccggttgaggtagcctttggattgatttttttaagcggtattttgtttgtaataatttcttttgttggtcttcgggaattggtggtcaaagcaatccctgccagtgtcaaattttcgatcagcgccggaattggcctttttattgcgctgatggggttaaagacaggggatgtcgtggtggccgggaactccaattctttggcgttcggtaatttaaattctccgaaagtatttttgttcgtactcggctttgttgtactgatactattagaggtacggaaattccgcggaagcatgattgtttccattctcgtggtaaccttacttggcattccgcttggaatcaccactgtgccggaaactatgatcaattttcctgcgtccgtaacggagattgtctttagaattgatatccgggggcgctgaagccggaatacctgccatggctgtttacatttttcgttccggatttcttcggaacgatcggtatcctcctgggagtggcagaccgggcggaatggctggatgaaaagggaaacatgccggggattgaaagatgttttaaagttgattctttgtccaccgtggcaggcagcctgttctgtatgccggttatgacgacgtacctggaatccgccagcggagtggaggacggaggacggaccggaatgacatccatcgttgcctcagttctgtttgtgctgatgctgctttttacgccattggctctgatgattcccagcgtggccacagggcctgtgcttacctatatcggtttgcaaatgcttaattccatgaaaaatattaattatgacgataaaacagagtcaataccggcctttattgcggtgtccatgaccatttttacaaataatattgccaatgggctttctctttccattctgtcctacgtgttattaaaagccgccgtcggtaaatggagagaaattcacgtttccttatacgggctttccatattcctcgtttactatctcactaccctggcctgatatctgctatttatttaattgtgagagaaatttaattcatttctctttacatatagttcagctgttcttaagttacaataacgcgcaccgcgatgcacaaaaagcagtaaaaagctattttgcactgtatgacccgggatatttgtgtgaaacaggttttttaatttcttcgcgggatactgcctgtgaactgtaatgtcctaagcggctggaaacctgggctgaggctcaagtatggattcagattatgattaacaacaggagggaacaaatgagtagtattggcagtgtattagaaagcagattcaagctgaaagaaaacaaaacgaatatccagacagaagttctggcgggcgtaaccacctttgccacaatgtcttatgttctggcaaccatccccaatatgctggagcaggcgggacttgtgaggggagcgattttaactgcgcttatctgtgcggtggtcatatgcagtgtggctatggcgctgtataccaaccggccgttttgcctggctcccggtatgagttccgtggctatcctcagttctgtcggctctatgaatatgactgtggaggtggcatatggcctgatttttattgaaggtgtcatttttgtaattatttcctttgccgggctccggcagattattgctaccgccattcctgccagtataaaaatttcactcagcggaggtattggcctttatatcgcgctgattggtttgaaatctggcggcattattatggccagtgacaaaaacaccctgattttcggcgatttaggtacggcaaaagccctgatgtttgggattggttttttgcttgttctgatatttgaggcgcgtaaaatcagaggcagcatgattctttctattcttattgtaacgataatcggagttcccctgggggtgaccacactgcccacaagcttactgaaccttcccagcggtataggcgatgtctcattcagaattgatattctgggtgcgctgaggccggaatatttaccgtggcttttgacgttctttgttccggactttttcggtaccatgggtattattctgggtgttgccaatcaggccggatggcttgacaaaaacggagatatgcctggcattgaaaaatgctttaaggtagactccctctcaaccgtagccggaagctttttctgtatgccggttatgaccacatacttggaatctgccagcggtgtggaggacggcggaagaaccggcctgactgccattgtaaccagcattctgtttgccctgatgctcctctttaccccgctggcgatgatggttcccggtgtggctaccggaccggtcctgactattatcggttttcagatgctgggctccatgagagggatcgattacgatgacaaaacagaataccttcctgcgtttgttgccgttgctatgactgttttaacttataacatcgcaaacggcatggcactggctatcattacatatctggtcctcaagctgtccgcaggcagggctaaggaaatccctactcccatgtatgtggtgggactgtgtatggcattttatctgtataccctgatttagcataaattaaaattcgatggagatgccgcagggcggtatgaatgtgcgatacgggaaggaggctgaccatattatatgatcagcctccttcccgtatcggcagctacgaactgccgtaacgaatctattaatttcttaaatctcagccgtgataaaaatatcatatattgctttgattgccggttcaaaatcatcattcttaacaccgataatgatgttcagctcgcttgagccctgatcgatcatcttgacattgacacgggcatgggccagagcggagaagatcctgccggctgtgccgcgggcagatttcattccgcgtcccacgactgcaatcagggccaaatcagcctccagatctacaaaatcaggctgaaccgcacggtggattccggctatcacagactgctcatagtccacgaactcatcctgatgcacaaaaatcgtcatggtatcaatgccggaaggcatgtgttcaaacgagattccatactgttcaaaaacatcaagcacttttctgccgaagccgatttcggagttcatcatggctttttcaatatttatggaacagaacccttttttacctgcaatacccgtgataacatatttgggtttgcggcaggtgctttccactatcagagtgccgggatcctcgggtttattggtgtttcggatgttgattggaataccttccttgcgtaccgggaagattgcatcctcatgaagaacgctggctcccatataggcaagctcacgaagctcccggtatgtaatcgtttcgattggcaccggattctccacgaggcgcggatcggtcaccaggaatccggacacatcggtccagttttcgtagatatcggcgtgaatggccttcgctacaatggagcctgtgacgtctgagccgcctcttgaaaaggttttaatggttccgtccggtttggagccgtaaaagcccgggataacggcacggtcgatatgttcaagacgctgggataattcctgatccgttttgtcagccagaaaatttccgttatcatcaaagaatatcgcttccgccgcatcgacaaattcataaccgaggtaatttgccatgacgattccgttcaggtactctccccgtgaggcagcgtaatcacggccttttttggcaatgaaattttcttcgattttcttgaattcaaaatccaggttcagattgagtcccaggccttcgatgatctgctcatagcgctctttgattttagaaaagattttaccatagcttgcgccggttgatgccgcatcgtaacaggcatagagcatatccgttactttttcatccgttttgctgcgtttgcccggggcagacggtacgacataacgtctagccttgtcggaacggatgatttcgcctacttttttaaactgcttcgcgctggcaagggaactgccgccgaatttcacaacttttttcataagttcctccctcgtattgtaggataaaaaatcacttactattttaataaaatattttgatagctattttaatatctttatcacggatgctctattcaagtttcctgattttcgggaaatactggaacaggactttggcaaccagctgatcctccgttacatatttgattttccagcgcctggaatcattggagtagttccggttatctcccatcatgaaataggatccttcagggacttcatagtgctggggcggctcttcctccatctcttcatggagatagggctcatccagaggcgtatcggaaccgttaatgtagattttcccatctatgatatctatggtgtcgcccggcattccgattacacgcttgacatagtaggtggtaatccctttatacgcatcatcgggatagacaaagattgcgatatcaccacgttccggttcgccgaaggtgtaggataaacgggaaccgattacccggtcgcccggcataatcgtagtttccatggagcccgtcggcacctggctgttagcgataatgtagcggtcaataacgaaggcgataatagccgctgtgacgagtacctgtatccagcttataatttcggctttccagttaaatggttcttttccgtttttatcttttgacggcttgcctgtatccgcctcccagccaccggtttcactgccgaccgtattttttgtcagttcccgttccagttcttctgccagagcgccgggcgcttccggctgctgggggtcctccggtttattttcttctatatttttcatggtatctcctgtttgacgaatgagtttagtttgcaatataatagtgtatatgagtttttttgatttatcaagtttttttaaagaaatttcgcaaatgataaggaatttttcagtttttcatgacgaaggggtgaaatatgggaggaagaaacaggaaaaacagggaaatgaggctgcttttggccggaggaggccttcttataatctctgccgtcctgcaggttctggcaagaaagaccggctggttcggacaatggtatgcacagtgggtttatccctggctttcagggactttagcccgcttttttggtttgttccccttcccggtcggtgagcttcttctctatttcctgcttatctcctgcgttttatacggcttttgtcatctggggcagtggaaaaagatagtatccggaacgctttttctgatttcactgctcttttttatctatacggtcaactgcggaattaattactaccgccgtccattttccgattacctggagtacagggcaggaagatactctgaaaaagagctggaggaactgcttggatggctgacgcagagagtgaacgcagtttacacggagacgggcggtcaggagcgccggaaggtgcagaacgaggctgtgaaggcgatggaaaagctgggagaacagtatccccagcttgccggttattacccaaagcccaaacccgttctgttttcaaggctcctttcaatacagcagctcagcggcatttactccccgtttacggtggaagccaactataatgcagagatgacgccttataatattccccacactgcatgccatgagctctcacatctgagagggtttatgagggaggatgaagccaacttcatcggatttctggcatgcgttggatcggagaatcaggaataccggtacagcggctatctgatgggatggatttacgcgggaaatgcactggagtcggtggatcacgaggcttatgcaggatactgggacatgctgcgaccggaggttcaggaggatctgcgcgaaaatacggcattttgggaccggtttgatacgaaggtgtcaaaagcggcggagacgttaaataatacgtatttaaaagcgaacagccagtccgacgggtgagaagctacggcagggcggtagatctgatgctcgcgtggtatcagtcggaggaaccctcctcagggccttagtatcagttcagacgggagtactgagacctgattggagatttaactgaggtgtggaggacgcgtccggaacggaccatgtccggtgtggtgagggggctggctgagtcttccgtccccgtgggaggttagttgtggagggggaatccggccggaatgaattcttacggggaccgtttgcacttttcgaagcgcatagccgtgctaaattcgtgagaaacctcattgaaggcggtgacctgtgcgcagagcgtacaggttatcgttaagcacggatgggcttccatatcccctccagaattgattccgcctccttcccccggtcagggtttcgccggggacggaagactcaggcggaggttttcgcacaccggacatggtccgttccggacgctgattgtctccagccttaaatggggagagccttgtcgcggccactacgtgtttccggcaaactgaaatcaaatcttccgcaattctttcataagggcgcattgaaagcatatcgtatttcccgcacacggaagcgctgagtggtctcgacaaggtccgcccccgcacttaacgcgtgagacattcagcggccgcaggccagcggacggggccgatacacccggcggagtctttcgtcccggcgaaaacctggccttgggcggaggggaagataaagtctgcggatgccgttgaaattcatcgctgattagcgaggtcctgtcgagcttagcagcgcgatgcatttcacagagcgggagtgtgctccgcagactttatcttcgcccgcagtcccaaaccacgataatcttccctcgggacgaaagactcataaaaccaccccagcaccccgtccgctggccgtaccggctgcgtcctcacctgcttaactaattctcctaatgttttagtaacagcgccccgtctgatcagttatgggccttatattgccaattctaaaattagggtaaaaagattgtattattcaattcatgatgatagaatgaaataaagtgtaactgttcgtaaacgggggaggacagggactttaaaaacaggtaggaagaaaaggaggcgtatttatggacaaagcattatacgacttgatggactgggccggaatcgaggaactggtatattcagaagcttccaatccgcacaacatgctgggtgcccatatgacagaggcgggaatgctggtacaggcgttcattccgactgccagggatatcacagttaaaataacatcgacaggaaagacgtaccagatggagctggccgacgatgccggtttttttgcggcgctgataccgagaaagactatggctgattatacgctgctggtattttatgataatggtaccctgggtgaaatccatgatccatactcttttgcgccccagttcaccgacgccgacttaaagaagtttgaagctggaattcattatggaatctataacaagatgggcgctcatccgatgacggttaagggaacggcaggcgtgtattttgcagtatgggcgccttgtgcgatgcgtgtcagcgttgtgggtgatttcaatctctgggatggccgcaggcatcagatgagaaagctcggcgagtccgggatttttgagatatttatacccggtgttaaaaaaggcgcggtttataaatatgaagttaagtttaaaaacggagatcctgcgctcaaagccgatccctatgccaattatgccgaactcaggccgaatacggcatcggttgtctgggatttgaacgagtaccagtggaacgacggggaatggatggacaagcgtgcgaagaccgatacaaagaccgcccccatgtctgtctatgaagtacacctcggctcctggatgagaaaagagacaaagactgacgatacgggacatgttattaccggttcggaattttataactaccgtgagatagcgaaaaagctggccgaatacgtgacagagatgggttatacccatgtggagctgatgcctgtgatggagcatcctctggatgcctcgtggggctatcaggtcacggggtattatgcacccaccagccgtttcggaaccccggatgatttcatgtatttcatggattatatgcacagccagggaatcggagtgattctggactgggtaccggcccatttcccgagagacgcctggggtatggcccagtttgacggcacctgcgtctatgagcacagggatccgagaaaaggctcacacccccattggggaacgctgatatataactatggaagaccgggagtttccaacttcctgattgcgaatgcgctgttctgggcagaccgttatcatgcggacggaatccggttcgatgcggtggcgtccatgctgtatctggattacggtaaaaacccgggagaatgggttgctaatatctacggaggccacgaaaacctggaggctgttgagttcttaaaacatctgaactcaatctttaaagaaagaaaagacggcgctatcctgatagccgaggaatccacggcatggccgaagattaccggaagcgtgaaggaggatggcctgggatttgattataaatggaacatgggctggatgaatgacttcctggaatacatgaaatatgatccgtatttcagaagccatcattataaggaattaaccttcagcatgctgtatgcatacagtgaagatttcatcctcgtcttttcccatgatgaggtggtacacggcaaaggctctatggcaggaaagatgcctggaatgagcctggaagataaatttgccaaccttcggactgcttacggctttatgatgggacatcccggcaagaaactcctgtttatgggtcaggacttcggccagctggatgaatggaatgagaatgttcagctggaatgggagttgcttgattatccgattcacggcaggatgaaggaatacgtaaaagaactgaatcatctgtatcggtcataccctgctctctataagaaagattaccagcctgatggtttcgagtgggttaactgtatggattctgctaataatattgtatcctttattagaaaaacggataagaaagaggagacgcttctctttatctgtaactttgccccggttcttcatgaaaaatatattatgggagtgccgtttgagggcaagtataaggagatctttaacagcgatgccgttaaattcggcggaagcggaaagggaaacccacgcatgaagacctccagggaggaagacagcgacggcaggaagcatgccataacggttcaggttcctccgatgagtatctgcattttcagttgtacgcctgaaaaggctgtgaagccggttcagaagaaggcggctgccaagaacacgggaaagcgttccgcaaaaaatacggataagagccataataaaaagccgtcccgcaatgcaggcgccgcgcccgccgggaaaccgggaagcaggatgaaaccggacaagccgcgcagatccgggcagaaggaaataccgcggaaccggaaagaaaaccggcggatgtgataccgctgaaaaagagaacaaagaaataaggcggtagataccggatgacaggacattatatattattggccgcggcgtccacggcggcggatgcagtggaggcggcagagagagatttaacggagctgagtcagattaagcccgggatgataaagcagatgcttgaggggctgggacccagccttatgtctctgggatggaaactgttcatagcacttatcttatttctggcgggaagaaaattaatccgctttgtacagagaatgatgagcgcttccttcgaacggaccggagtggaaatcggagtttccaaatttttgcgctccctgacggaattcagcctgtatgcgcttctggtgtttattattctgggccagcttggagttaatacgacatccatcctggcggttctgggtacggccagcctggcgctgagcctttccctgcagcagagtctttccaattttgcaggcggcgtgctgattctgatgatgaagcccttcaaagtaggcgactatattgtctgtattcatggggaaggcacggtttcgatgattggactcgtctatactactctggcgaccgttgacaataaggcgattacaattcctaacggtacgctggctaactcgaccgtcaccaatgtaacggccatggaaagaaggcggctcgatttaacggttggaatcgggtaccgttcggatttaaagaaagcaaaaacaatccttgaaaaactttacagagagcatcctgcggttctgaaagatccggatataacggtgtttgtagacagcctgggagagagctcggtaatgatcggtgcaagaggctgggtagcggcggatgattactgggctgctaaatgggacattacagagaaaataaaactggcgtttgacgaggccggaatcgacattccatttaaccagatggatatacacattgtccgcgatgacggttagggtaccggcgcaatcgcggtcgtgcagaaaaggagagttccgatgataagggaagcagctgaatttgcggaaaaagcgcatcggggggcggtcagaaaaggttctgatataccttatatcacccatccgctggagacggccgttataacatcgatgatgtcggatgacgacgaactgattgcggcggctctgctccatgatacgatggaggatgccggagtgagctatgaggagctgaaaaaacatttcggcagccacgttgcggatctggtggcggaggagagcgaggacaaatccaaaacatggatggagagaaaaagccggacgattgaacatctccgttctgcagggcgtgagattaagatactcacgttggcggacaaactcagcaatatccgcagcacggcaagagactatctgctggagggtgagaatatttgggagcgcttcaatgtgaaggaaaaagataagcatgcctggtattataactccatggtcgatttgctgaaggagctgggagattatccagaatatcaggagtatgtgagactttgcaggacggtattcggcggcgcgcctggcggaccgtcgtccggcataccgcagagcaggctttggcacagggattaaatttatatggacagaatcggaaataactcttattttccggttctgtcttttacgtgaggcgaaattgaggatgaaggacgcgttaggaacggaccatgtccgcatccgcagactttatcttcccatccgccccaaggtctggttttcgccaggacgaaagactcatttcccctcaccccgtccgctggccgtaccggcggcgtccttaccatcttaactaaatctccatagaattttcaatcacgctctggcgcacgctacttgacagcatagaataaaataagatatacttcaccccatagatactcattggtaggacatatgcggagacagaatgaaaaagaggtaggagagaatgattcttaaggatatctggctggatgtgaaagccgtaaaggagagagatccggcggccaggaatgcgctggaggtgctgctcttatatcagggagttcatgcgctgatttggcacagggttgcccactggttttataagcaccatatgttttttatcgccaggctgatttcgcagctggcaagattttttactttgatagagatacatcccggcgcccagctggggcatgggatattgattgaccatggatgcggggttgtgattggtgagactacggtggtcggtgacaactgtacgatataccagggcgtgacgctcggaggcgtgggaacccagaagggaaagagacatccgacgcttggcaataatgtgacggtcggcgcgggagcaaagattctcggttcctttgaagtcggcgacaactgttcgattgcggcgaatgccgtcctgctgcgccagctcgatgagaatatcaccgctgtgggaattccggcccggccggtaaagaaagacggcgtgccgattgagaaaaaaaagaaaacaatcataagtgagcataacagaaagatgatggagcagctggaggagcttcagaaagaagttgaggtcctccgcaaagcgctggaagaggcgacaggaacaaccgtacctcctgtgattgcaggcggggccgctgggacgtccgaagcagctgagagtgcatcataagagagaaacagaacgatagaaggattagaggaagcagccggcttatgcagaatacagacaaagatcagcatgatacaataaaatgcagtgaagagaccaggaatgaaacgatgagggaaaaagagcctgaccgctgccgtgagatagagaaaagcattatcaaacggttccgcaaagaaatatggcgtccttttgtaaaggcactgaatgaatatgatatgataaaagagggcgataatattgccgtctgtatatcgggcggcaaggactccatgctccttgccaaatgtatgcaggagatattaaggcatgggaagatggaattcgggctgcattttctcgtgatggatcccggatataatccggccaaccgcaggatgattgaagagaatgccaaaaccatgaatattccggtcactatattcgactcggatatattcgatgtagtagtggatgtggatcagtccccctgttatctgtgtgccagaatgaggcggggctttctttatgcaaacgcgaagaagctgggctgcaataagatcgctctggggcatcattttgacgatgtgatagagacgatactcatgagtatgctttacggcgcgcaggtgaatacgatgatgccgaagctgcacagcactaattttgaaggtatggagcttatcaggcccctttatctggtgaaggaagccgatatactggcatggaaggactacaacggcctccggttcctccagtgcgcctgccggtttacggaggcggctgaggccgtcgcggggagagatgaaaaccacctgtccaagagacaggaaatgaaggagttaatcaacagcttccggcggattaatccgcatattgagacgaatattttcaagagtgtcgagaatattaacctggatgcctgtatcggatacgtcaaagacggggagagacatcatttcctcgaagaatattagaataagggccggatttgtagtcaggcagaaaagcatcggtatgaaaaccggtgctttttaatttaacaggaaagttctcctgttaaattaaaaccgctccgcgggggatcgcactgcggcggaagggaatcatgtcgccatagcgacccgccgcaggcggagaatctcgtgaacgagattctttgctgattaacaggaaagttcacctgttaaattaaaaccgctccgcggggatcgcactgcggcggcgggaatcatgtcgccacagcgacccgccgcaggcggagaatctcgtgaacgagattctttgctgattaacaggaaagttcacctgttaaattaaaaccgctccgcgggggatcgcactgcggcggcaggggaagattggccgcgccggttttcatatttggaatattgtcacgtctgtccgcataaactttcataaagttgtagatatggaaagggcaggtgcgatcattaatgatggagctgatgaaaaaaaatatacatatgaacagacagaaagggaatgcggtatcccagattacgctggatgatgattttattgtcccggacacgatggacgatgtatcccaggttcttctggataacggcgagatccagatcgaatcttcaagaacccagggggataaagtcctgattaaggggaaactggctttccgtgtgctgtacagaaaagctgagggcgggctgcaggctctgggaggtgaagtgccgtttgatgagacggtcaacgtcccggatctggatgaacatgattatacccaggtatcatggacgcttgaggatttgaataccagcatgatcaattccagaaagctgagcatcaaggcggttgtgacactggaagtgcgggtagaaaatctgtatgacgcggaggcggccgtggatatcgaaacagatgatgaagaggtggaggtattaaagagaagtatcgatgtggcggctattgcggtacgcagaaaagatacgcatcggattaaggaagatatccaggtgtcgggaaataaaccgaatatcgaaagcattctttggaatgagatgaggctgagaggtgttacctgccgccccatggacggaaatatccatctggaaggggaactgatggtatttatcatctatgcaggggaaggggagcatacgccggttcagtggcttgaggagagtcttccattttcgggggatgtggagctttcggaagcggaggaggagatgatcccggcgatcggcgtgcggattctgcaccggggcatcgagatgaaaccggactatgacggagaaatgcgggaatttgaactggacgctgtcctggaactggatatgaagctctataaggaagagaacgtagagcttttaagcgatctctattccaccaaccgggaacttgtgctggatacgggggaggcatgtttcgaccgccttctgaccagaaatatctgcaaatgcaaagtggcagaacagttaaaaatcagcaagccggaccgaattctccagatttgccacagcagcggcagcgtgaagctggatgaagcggaggcaagggaggacggactgcatatagaaggcgtcctggaggtgaatcttttatatctgacggacgatgatacggaaccggtaggagctacaaccgaaatggtaccgttccactgtgtggctgaggccgacggtatcaatgcggacagtatctggcagatgaacctggggctggagcagcttacggcagtcatgctgggaggcgattcagtcgaggtaaaagccgtgatcgcggcggatttgctggtgctgcagcctatacgtgagcaggtggtaaccggggtcaaggtcgagccgctggatatgcagaagctgcagcagatgccggggattgtgggttatattgtgcagcccggggattcattgtggaaaatagcaaagaaattccacaccactgtggataatattaaagagacgaacggactgacggaagacgagattcggcctggggataaacttgtgctgataaaagagatttagttaactaggtgaggacgccgccggtacggccgctgaatgtcccacgcgttaagtgtgggggaggatcttgtcgcgggcactcagtgcttccatatgcgttagatatatgttggatatgggctgatgcagttgtatgagtatattggttggaaatttgctatatttaatgtttatagattgagcggaattaaggccggaagaatatcaccggttttaattccgctcaatttggtgtggtatggaaatttaacggaggttaggaggacgcgtccggaacggaccatgtccggtgcggtgaggggactggctgagtcttccatccccgggtggaggttgtcgtgaggggggaatccggccggaatggattgctgcggggaccgtttgcactctttggagtacgcaacagtgctaagctcgtgagggacctcgctaagcaccggcggactcccatgtcccctccgcaattgattccgcctacttccccggttcaggttttcgccgggacggaagactcaggcgaaggttttcgcggcaccggacatggtccgttccggccgctgattgtctccaaccttaaatggggagggccttgtcgcggccactacgtatttccggcaaactgaaatcaaaccttccgcaattctttcataagggcgcatttaaggcatatcatattttccgcacacgaaagcgctgagtggtctcgacaaggtccgccctccgcacttaacgcgtgagacaatcagcggcggcaggccagcggacggggccgatacacccggcggagtctttcgtcccggcgaaaacctggccttggggcggaggggaaaataaagtctgcggatgccgcctaaatccatcgctgattagcgaggttctctcgagcttagcagcgcgatgcatttcacagagcgggagcgtgctccgcagactttatcttcgcccgcagccccaaaccacagcaatcctcccccgggacgaaagactcatatacacaccccaccaccccgtccgctggccgtaccggcggcgtcctcacctgcttaactaaatctccaattactatggaaagtctatttacaatatgttaaaatataggaaattttgcattaaacggccgaaaggaggcaaaccatgcagcttgtacgtctcagaatcagaaattacaaagtgatacgtgatatggagatttgtgatatcgaaaacgctctgattctggtgggaaagaataatacgggtaaaacctcggtccttgatgcaatccgggttgtatcaggagtggaggagcttacgaaagccgattttaatgaagcaaagcagaatgtggaaatcgaggtgactcttgagattacgccggaggatcggagaatgatgcaccgggccggaatagtgagccggtataaacggtatgaaatctgggaaaatgatttctaccggaagcttccgtcctgtaagggagatttgctggaatttacctatacggccaattatgaggggacggtccgctatacggacgggataaagaaagataacccctgcatcagggaagtgcttccaagactgcattatattaatacggcaagggagcttcaggcctttcagaatgatctgctgcttttccatgataaccggattatgaaccagctgcgctccggccgctgtctctttgatgcggctaaagagtgcagacactgctttcagtgtatcggactgatcaaccagaaaaagccggaggaactggatgcggcggagacacgaaagcttctggaatataagctgtatcagtcaaatatgggcgatcttgtgggacgcatcaatgacaattttcataaaaacgggggatatgacgatatcctctatgaactgcgctgtgatatcgatcagatgtttcagattgaggtgaagacttataacagcgaacgcaaagaggtggatacggtggagcatatgggaaaaggtatgcggagtatctacatgctgtccctgctggaaacatatattgagggagagaacaggatgccgagcattgtcattgtggagtatccggagttgtttctccacccgcagcttcagaaggtatccagcgagattttgtaccggctgtccaagaagaatcaggttctgttcagcacccactccccccagcttcttttgaacttcaccaaccgtcagatccggcaggtagtattggatgatgaatattactccattatcaggagaaatacggatatcggagaaattctcgatgatttgggttatggggcagccgatgccatgaacgtcgattttgtattcatcgtggagggaaagcaggataagagccgccttccccttctcctggaaaaatactattccgaggtccatgacagtgacggcaccctttccaggatcgccattataactaccaacagctgtacgaatataaagacgtacgccaacttaaaatatatgaaccaggtctatttaaaggaccagttcctgatgatacgggacggtgacggaaaagatccggaggaactggccggcgggctgtgccgttactatgacgaacagaatctgagggatgtggacggactgccgcgcgtgacacgtaagaatgttttaattctgaaatattattcttttgaaaattatttcctaaatccggagattatgacaaagcttgggattgtgaaatcagaagaagatttttatcatattctgtggcagaaatggacagaatatctcggacggctccgttcaggaaaaaaatttgtccaggcgctgggacacgaacccgattcggaggacgacctgaagcagcatatggagctgttcaagatccatatgagaggccacaacctctacgatattttttacggacgctataaaaagaaggaaaggcagatactgaagcagtatatcgaactggccccagggacgagttttccgacatactggatggcattgacagctttccttattttgacagccggaaaaaaatgccggaatgaaagttgcatttccggagaaaatccatataatagattatagccaaagcagaggaaggcaacagttacagagcagtttttgtgattcgtaactggctacagcgcatccggccgatgctttagatagatacgaagctttgtggaagtgccgtcaggcgccccggagctttgggcggtaacggcacattgcaaggtgttgttaccgtttacataccccgtctggaggaagaggatgaattacacatatcttctgcgctgtgcggatgattcgctttactgcggatggacaaaccatctggaacagcggataaagatgcataattcagggaaaggcgctaaatatacgaagagcaggcggccggttgcccttgcctactatgaggcctggaatacgaaagaggaagccatgaaacgggaggcggcaattaaaaagatgacaaaaaacaagaaggaggctctggcggcggagcttcgtattattatatcccctgccaaaaagatgcaggtcaggacagattatctgccctggaaaaacatgcctgtttttttggacaggacgcaggtgctgaaagaaaagctgcagtcctattcagagcaggaattgaaaaagcttttttcggcaaatgattccattacccatgaaaattaccttcgctaccgggacatggatctgaccaggaacctgacacccgccgcactttcatatgttgggatccagtatcaatatatggctccccatctgttttcagaagaacagtggcggtacataggaagacatctgcggattctgagcggcttttacggaatcctgagagcggacgatgcggttgttccatacaggcttgagatgcaggccaggctggcggcgggaggagccggggatttgtacggatattggaaggatgcaatatacagagagctgtaccggcctgacggggaatccgggaggcggtgcaaagttttaaatcttgcttcaaaagaatacagcaaggcggtggaaccgtggctgaaaccgggggacgagtttgttacttgtatatttggtacgcttacagacggtaaggtcaaggtaaaggctacggaagcgaagatggcgaggggagagatggtgcgtttccttgctgagcagaatgccatgggatttgagacggttaaacaattcgacaggctgggattttcctatatgccggagctgtctgatgagagccgatatgtatttatagtaaacgacaaaaaaattgacgtttcctatactaaaaataagcaggggcatgtgaattagagtaacagtccatgctgtctgaaccgttacgaattaaaacagatgaggatgaataatgataaaatttttaataaagcggttaataaaaaattctgataatgtgaaagaccctgccgtgaggcgaatgtacggcactctgtgcagctcggtggggatcggccttaatatctgcctgtttgccggaaaatatctggccggtgttttgagcggttccattgcaattatggctgatgcatttaacaatctgtcggatgccggatcttccctcattactctgataggtttcaagttcgcagggatgaagccggatgccgagcatccgtttggacacggaaggattgaatacatatcggggcttgccgtatcggcggcgattatcctgatgggggtggagctggcaaagtcttcggtttccaagattatctccccgtcaccggtggatatgagcatgatgtcgatcgcgatactggcggtttccgtgtgcgtgaagctttatatgtgcagttataaccgattcgtgggaaaacagattgattcagccgccatgaaggccacggccatagacagcctgagcgatgcggtggcaacctcggttgtgcttctggcgatgctggttcttaaatttaccggattgaatgtggacggatggtgcggcgcaatggtcgctctgtttatcctctatgccgggtacagcgcagcgaaggataccttaagtccgctgctgggccagccgccggaggaggaactgataagccagatacgggacatcactctgtcccaccaggagattgtgggaatccatgatctggttgttcatgattacggtcccggaagactgatgatatcgcttcacggggaggtgccgggggacggcaatatatttgaacttcatgatgtcatagaccaggctgagaaggagctgaaagacaaactgggctgcgacgcggtcattcatatggatcctatcgcaaccgacgatgaggaggttaacataaccaggcgaagcgttgcggaactctgcaaagatatccatgaggacttgagcatccatgatttcagaatggtgaagggaccgacccatacaaatctgatattcgatgtggtaataccgtttgccctgaagttgtcggataaagaggtcacagatgaaatacggaaacggataagccagaaatgggataattattatgcggtgatagaggttgatcacagttatgtactgtaggaaatggtttgttacggtttacaaacagcaacaatggtttcggagagggccgcatcatacatgagaaggagaaagtcggatgaaaaggtacaggaagtgggcggcagttttagctgccctgtgtatgatggggacggcgggatgtgcatctcagacttcggatgttccttctgaacagccgggaagcgaaggtctgacggaaccggttagtcaggagacgcaggaaattatccctgaaagcagcagggaagaagccccatccggcagccggcccggaggaaaggaaacgcagccggagagtacggaggagacgagggagacattgcccgacgacccggatactttcgttcagcaaaagattattgtggcaacggatatccattatctggcggaggagctggcgggaaacaggtgccagagctttatgtcttccgttgaatccgggacggccgtgtacttcagtacggctgggagattctggatgcctttatcgatgatgtagtggaacagaaaccggatctggtcatcctcaccggagatttgacaatgaacggagaaaagcaaagccatgaggaactggcgcaaaagctggagactctgagcgaaaatggaatagaggtggcagtaattcccggaaaccacgatatcaacaatccgtatgcgcggaagtttacttcggacggtactgtaaagaccgatagcataacggcggacgaatttgcccaaatctactcggattttgggtatgtggcggccgacagccgggatcccgcatcgctgagctatctttacaagctggacgattattactggcttttaatgctggattcctgccagtatgatccggtcaaccgcgttgggggcatgattcgcggggagacctatgactggatggaaaaacagcttgagtcggcctgggaggaaggcgcccaggttatcacggtatcccaccacaatcttctggatcagagcggggtcagcagggagttctatgacgactgcaccatcgaacacaacgaggaaatgatccgtatgctgtacgattacgatgtccggcttcatctgagcggtcatctccatctgcagcattataaagaagatgaagataacggaatcagcgagattgttacaggctccctggtgatggccccctgtcattacggagttttgaaaatctggaacagcggagatattgagtacaatgctaaatcggcggatgtagacggatgggcaaaaagaaattcatataaaaaccgcgatttggctgattttaggaccttcagtgagcggtttttaaaccaggttacatacaggaatgcagttctggatctcagaaagcatacgatggaacacagactgtttttcagtgatgaaaaaattgatgaaatggccagattttatgcgaaactctgcgtatactactacggtgggaggatgtttgagattgccgattcggtacagaacgaaaaagcgtatgaatactggacttcaattgattacgtgagtgatctgagcgattttctgaggaatatactcgaggatgatgcgaaagatttttctcacctgacgattcactattgacgcccgggaaccggcggacaggcaattcagaaaagaggaaggcatagtttatgcaggacaggaaaaaatcagagctgacaacgctctgctatatagaaaaggacggcagctatctgatgctgcaccgtgtgaaaaaggacaaggatgtaaataaggataaatggatcggcgtgggcggccattttgagaaaaatgaaagcccggaggaatgcctgctccgggaagtgaaggaagagacggggctgacgctgacctcctggaagttcagggggatcctgacctttattgccgagggatggccgatggagtatatctgccttttcactgccgacggatttacgggagagctaaaagcgtgtgacgagggtacgcttgaatgggtcaaaaaagaagatgtgttcaagctgaacctctgggagggagataaaatttttcaccggctcctgcttgagagggaagactttttttcgctgaagcttcactacgacgggaatgaactgaaggaatgggttctggacggaggacgggagcatggagaaggtaagagcagtactctttgatatggacggtaaagccggggctttatgagctgatttcctgcctgaagggtataatcgattttctggaacggagattatgagaatgggactcaaatgcctatataaagaaaacggagattctgtaacaatactaagatgctatggggagtacggccggattgtactccctgagtctattaacggaaaaaaggtgacggagctgggagactatatattctcagaggatatgcggcacaagccggaggggaaaatatggacggagaacggcacttcggaggaacgctgcgcagatgaaaacacggcggcctgcggttcccgcgtccgggagatatgccttccgtctacaataaagaaaatcggcaggtatgcattttataactgctacagccttaaaaagcttgccatgttctccacagccgtagatattggcgccggagcttttaacggctgccgtcaaatcgatgagctgacaatcggtgtgattaaaggggagcgctcttgcctgaaagaggttttggcagagctgaatgaatcgctgacggttttttaccggcagtatgagaagagcggggatggggaactgaaatgcaccggcagggcgcagcttttgtttcccgttttttatgaggaggctgtggagaatacaccggccagaatcctggaaactcatgttcatggctgcggtcaccgctaccgctatgcatttgaaggaacggaatttaagttcagggaatatgacagtctttttatccatgccagagcccaggaatccccgcagcaggcggcagtcctggctctcggccgtctgcggtatcctctggagctttcacaggaagccagcgtgacgtatcgtgaatatctggtgcagcatcctgtagaagccgctgcctgtctcctgaaaaatgacagcatggaggactggagatggtttgtcggtgaatttacgccgtgtggggaaaaaatgataaaggttgagcacgcagctgcgggttgtttggggaacgagggttatgcagtgcgtgctcgcgaggaatattccgatataaagaaaccggttttggggaaaaccggctttgctaaactgattgaagcctcaaaccaggcagaatgtacggaagtcacaagctttctgatggatgcgtcttaccgggcctatcctccggagaggaaaaggtttgagttataaagccgaaaaaaataattcaattgttttctttagcttgattatataacatggttcgtatataatcaaatttatataacaaaataatagttattaattttttattataaaggatgggcatcgcagtctgcagttttttgcaggttacgtcaaccggtaaagtaacaggaaaagaacggtaaaacaggaggaacgatgtttgacggtaaggaatacgtatatgctgtttacgaagaaaaaagtttttcaaaagcggcgcagaagctgtatatcacacagccggccctgagtacggcgattaagaaggtggagaaaaagattggaagtccgatatttgacagaagtacctcgccaatcgggctgacgcccagcggagaggtctatattgacgccattgagaagctttttgcactggaacagaataccattaatcaattaaataatttaaacgggcttctgaccgggaaattgtccatcggcggaaccatattttttacctcctttatattgccgggaatcctcggagagttttcgagaaaatatccccagattaaaatcgagctgattgaaggaaccacctcccagcttacggataagctgatgggtgaggagcttgacttgattatcgacaattctgagctggatgataagaattatgagaagtattattataacacggagcggattatcctggctgttccgaaagagtttgaaatcaataaggaactgaaggagtatcagcttacttcggccgacatcaggaaccggcttcacagagacgatgatttcccggctctgcctctgtctcttctcaagaacacgccgtttattttcgtaaaagaggaaaacagcatctataaacgcggcgtcaagatgtgcagccgccagaactatacgccgaacataacactgaagccggatcaggtggtatcagccttcaatatggccggaaagggaatcggagcgacatttatcccggatgccctggttgaaagcctgtcctatgaggttccgctgtgttactataagatggaagaatcactggccgtacggcaggtttatttttataagaaacggaataaatacctgaccaagaccatggaggagtttatccgcgtggcggtaggagatgaagggtttcagaaagtaagggaggccagagagaaagaaaatcaggagaagaaaagtcaggagaagagatatggagcgaaaaacaccggcagcctgtgagcaggaaaaggcggagaaactggtttctgtctgccgtgaaatactgttgaatgccagaaacgagctgtatctgaacctgcgttttatggatgcagccttaagctccctgaatttcgtacctgattttaccgcagagggggcagggacagacggttatcattacacttaccagcctgactttctggccggcaggtttatgtccggccgcgtccttgtgaaccggctgtactttcactcggtcctgcactgtgtatttgtccatatggatacaaaaggcaagagggaagaaggactgtggaatctggcatgtgacatcgccgtggaatatctgatcgattccatggatatgaaatgccttcaccgtccccagacccctgccagaagagaatgttatctgcgcctgaaagaaaagaacggggtaatgaatgcccagagtatttaccgctgcctccaggaggaaaaacttccggaggggcggtatcttgcgcttatggccgaattttatgcggataaccattcttattggacggatgagaatgacaggccccggatggcatcggaccggaaaaacaaatgggacggaatgcgtgagacgatggagacggagatggagacattttccaaaaaggcatcggacgaggcgggagaactgtccaggcaggtcaggatagaaaacagggaacagtatgattacagagagtttctgagaaaattttccgttatgcgggaaacggtacagattgacacggacgcgtttgattatatatattatgattacggactgcggacttacgggaatatgcccctgatcgagcctcttgagacaaaggaggtaaagaagatagaggaatttgccgtggtgatcgacacctccatgtcctgttcggaggaactggtaaggcgtttcctggaacagacgtatactgtcctcagtgaagcggaaagtttttttacaaagatgaacatacatgtgatacaatgtgatgaaaagatacaaagcgatcatatcatctcttcggcggaggagctggcggattatatggaacacatggagatactgggaggcggcgggacagatttcaggccggcatttcagtatgtggattccctgattcagaaaaaggcctttaccggtcttaagggacttatctattttacggacggatatgggatgtttcccgtaaagatgccgtcatatgataccgtatttgtatttatgagagatgactacagtgacgcagacgttccctcctgggcgatgaagctgattctcggcccggaggagcttgataacggcggcacaggcgcggtttagcagaattggaagagaaggaggagaacaggatgaggagaaatgacagagcggttgtggagcaggaacggattttagcaatggtgaagaaatgcagcgtatgcagtcttgcatttgccggcggtgcattcccttatgtgatccctttgaattttggtgaaaaggcagcagatggaaaaactgtgctttatttccacggggccggggaaggaataaaatttgagagactgagggaggataacagagtcgcgttttccatgtatgcgatagaagagcttgtcttgaaagaaccggcctgcgcttcgacaatgctgtatgaaagcgtctgcggcacaggaagagcttttgtagtagagggtacggaggaaaagacagaagctctgacagctattatgcgccattatgataagaataagaaggaatttgagtttggtataaaagctgtggaaaaaacgacggtcatccggctggaagtggaagagatgacagggaagacaaaccgttgttaatcaggatgaacaggtgaaacagagatgaatatcaagagggctaaggaagaaattaaaaactgcatagaagcatatcttttaaaagatgggcatggggaatacgtgcttccggctgtcaggcagaggccggttcttctgatgggccctcccggaatcggtaaaacccaaatcatggaacagattgcgagagaatgccaggttgggctggtatcctatacgattacccaccatacgaggcagagcgccatcggtcttccttatattgtggagaaagaatacggaggacggccgtgttccgtgacggaatataccatgagcgagatcgttgcagccatctatgacaagatggaggagacgggacttcgggaagggattctttttattgatgaaatcaactgtgtctcggagacgctggcaccgatgatgctgcagtttttacagaacaagacttttggcagccaccggattcccggcggctggattattgtgacggccggaaatccgccggaatataacaaatccgtcagggaatttgatattgcaacgctggacagaattaaaaaaattgatgtggaagccgattatgcagtctggaaggaatatgcggtcatgaccgatatccatcctgccgtgacggcatacctggaagcgaggccggagcatttttataaaattgaaacgactgtggatgggaagcggtttgccacgccccgagggtgggaggatctcgcccgttttctggaaatatatgaaaaactgggaaaaacggttgacagggacgtgatatatcagtatattgaacatccgggtatcgcaaaggattttgccaactatctggagctttacgggaaatataagacagattatcagatagagcggattctgtccggaaagccggacggggagatgattcgccgcgtggcggccgcatcctttgatgaacgattcagcgttctcagcctgattttagcccatctgaacggaaagttccgggagatttggatgaaagagcagtatctgggacttctgaaggaagagctggagaaattcaggcagatgacaacagaggcaacccggacagagaatccggacggcgcagaccctgccggcctgttaaaagagcttgcggccgggatgaacagccgtctggaaaagaagcggaaagccggattgacagggaaaaaagaagaatatctgatgcgggacgtgtcggaaaaactggaggattacgctctggtaatggagaaagaacctttgtcctccctgcaagatggttttttgaaggccagggagcttttcgcggcagaggtaagtgaatatgaaagcttgtctgaggaagccctgaggatgctggagtacggatttgattttatggaagcggccttttcggcgggccaggagatggtcatttttgtgacggagctgaatacaaattactacagtgtgaactttttgagagaaaacagatgtgagcgttattatgaatacaataaaaacctcctgtttgaggacagggaaaaacaattgtttaatgctttgcaaaggacggcagagctttaaactctccggagtaaacgacgtttaagcagctgataagaggacttgatatagaatgagaagatggagaaacatgctgcggttcctagcccggctcaaagccgcagtctggcggatcgtaacacatgcgcagcccggcaataataaaaatcacagtgtggcgccgcgcaccccgggagcttcgcgtaaaaaacgccccaaaacatccggcggcacggcgcgtcacgtttcgccgcgcatgccggctgctgaaagtaaccgtaaaatgtctctgcttgtttatgcggcagagattttactgctttttgcggtgattgcactggttgtacgttttattcccgatttcagtaaaaagggcgcgggagaatctacatatgaaagcagtgaggagcagacgaaagaaaaagaaaatccgaaggagagcagcgcggcccaagacgcttcgaaacctgatgaggacagcggaggagacgctgctttggatggcgcaaaaatacagaaagcaaaacggccgtcccgtccggtaacggaggagagtgagcctgcagaggaagagaagccatatgtccctcctacaatgattgtggcttcggatttacattaccagtcccctaaaatgacggatttcagagagtcactggatacttatacggaatggaacgacgggacggtggtgccttatctcgatgtgattgccgacgcttttctggaagaggtcatgatgaaaaaaccgtcggtcctgatcctgagcggagatatctcccagaatggtgagaaggtaaaccaccaggagctggcaaagaagctgaaacaggtacaggatgccggaatccccgtactcgtaattccgggcaaccatgatatcaaccatccctgggccgcctcctacttcgataataagaaggaagaggcgaagggtacgaccccaagtgaattttatgaaatttaccatgaatttggctatgatcaggcatcttccagagatgaagactccctgagctacctgtacaggctggatgaacattattggattatgatgctggactcctgcatttatgagcctgtacacgagaccggaggcagaataaaaaaagagacgctggcctggatggagagacagcttgaggaggccaaagaggccggggccatggtgattcctgtggcgcatcacaatctcttgaaggaaagtacgctttatccggaagaatgtacgctggaaaacaacagggaagtgatcgatttgctggaagaataccatttacctgtatacataagcgggcatcttcatcttcagaggatcaagaagaatgtcaggggaccattggaggaaggggagtacggaatctatgaaatagtgtcgtcatcgcttgcgattcctccctgccagtatggaataattaactggacaaatgacggcagtttccgttatcatacaaaagaggtggatatatcgggatgggcagagcgttatcaggaagaagatcccaatctgctgaattttaaagagtacagcagccagttcctcgtggatattatcagtaaccagacatttaaagggctggaatcaataccggatgaaagaaagcgggagatggcgcagctttacggcgatttaaacagcgcgtactgctcgggaaaaccaatcaatgctgccaggataaagagcagccagacttatttttactgggaacgttatctgggaacaagcaaatggtttgaccgcttaagagcaatactgaaggatacgaagaaagaccacaattcgctgagcctgaaagcaggaaaggattttcctgcatggctgccggcagaatccgggttgaatatgaataaggagtgaagatagaatgaaatatgaaggcgttgtatacagaccccccagcgaagccaggagcctgatcgttcaggtgacgatagggtgtgcgcataatacctgcacattctgcaatatgtataaggataaacaattcagggtgcgtaagatggaagaaatcatggctgatttacaggaggcccacgacgcctatgcagcctacgtccagaaggtattcctggcggacggtgatgccctgattatgaaaacagaggatctgctgacgattctggcggcggttaaagaactgttcccgagggtgacgagagtggccgcctacgggactgcccaggatatactcagaaaatcggaagaagagctgcgcctgttaaaagaggcaggcctggggattgtctatgtgggagcggagacaggagatgatgaaatccttgaatacatccacaagggagtcaccgcaggggaagtaatcgcagccggacagaaattaaaacggtgcggcattgcaacctcggtaacgctgatatccgggcttggcggaaggaaaaaggttaaagagcatgctctttcctgtgcaaagctgatcacggagatgaacccggaatatgcctcttttctgaccctgcgcctgtatgagggaactccgatgtacgaagacgtggtggagggccgtttcgagcggattacggccgatgaaattatggatgagatgaaaattttcctggaaaatgtggattcaccgggaacggtattccgtacgaaccatgcgtcaaattatgtcgttctggcgggaacgcttaatgaagatatccccgaaatgatgaggacccttgaggacgcaaaacagagccgtcattacagaagattcagagagacaggagatttattataaatgatttacctgatactggcagctctctgcagcgcctcgatggccgttgcgctgcgcctgagcgagggatacagcagcaataaatatgcaattttgacgggaaattatgtgacatgtacgtttatagcgtatatactgctgccggaaaagcggattttaccgtccctgacgaatctgttccgggcgggagcggaggctggtgcagagaccgccatgatgactgcggtactggccggtataattaacggagtgttctttttgggaatgcttctgcttttgcagtacagtattaaaaagaatggagcagtgttatcttcggcttttgccaagctggggattatgctgcctgtggcagccagcgttctgttcctgaacgagagacccacgctcctccagacagccggaatgctgctggtggcagccgctattttagtgatcaacctggaaaaaggaaagggaggggcatcttcaaaaatgctcctcctagtgttgttcttattcagcggaatgggcgacgggatggcaaaggtgtttgaacgtatcggagaacgacggtttgacgccctgtttttattttacaccttcctgacggcactggttctcagcctgattccgatgatgagggaacggttcagtgtaaacagaaaaatgagtgcggcagattttatcagcggaatttttgtggggattcccaattatttttccacgtctctgcttctggcggccgtcaccagactccctgcttaccttgtttatccctgtttcagcgtgggaaccatcctgattgtcagctttgtgagcgtactgcttttaaaggataagatgaccagacgccaggtgtatgggtgcggcctgattcttgcggccctggttctgctgaacctgtgataagttcccggctcaggagcttctgccgtgtaaaacagtcctttcataatagaatatgtattgctgcattactccggcatagcctttgtatttcccgaaattctcctgcaccattgtctcatacaggcggcttttaggcagcgcatcgtattttttacggtagtaatggtttgtcagtatctgctgtatccaggtatcgacagggaaggcctcgatgtgatgaaggccgaataggcagatacagttggctacctttgttccaatgccgtaaaaacctgacagatattccatggcatcccggtagcccatggcggaaagccggttcaaatccagtgtaccgttatcggcatcgaggcagatacggtggatatagcgggcccggtagcccagctttaatgactgaaggtcttctaaggaggccttttttaattgggccggagtaggaaaggaaaaatatacaacggttttcccgccgggaaaagtacaatgcttttcttcgccgtacagacggcttaagttctccactgcctcccgtatttttggtatagtcctctgctgggagataatgaaagtaataatcatttcccaggcatcctggttcagaatacggataccgctgcctgcattggcagcgttctgaagatagtggtcgcgctttttgacagaagacaggaaagcaccgtaatcggtattcaaatcaaagtaatggtgccagaacggataatcctcatcagggcaatgaaaatgaaactgctgcccttcctgtgagatttccagataccggcccctgctcacggccgaatacagtcccggttccaggcagttcatgcggaaacactggccggacccggcgatttgccgcagatcaaagtggtttatctctattgtaatcatataagtaagtccttttcaagtaaaatttcactttactattttaccatacttgagagggggatgaaagatggagatttaactgaggttaggaggacgcgtccggaacggaccatgtccggtgtggtgagggggctggctgagtcttccgtccccgattggaggctgtcgtgaggggggaatccggccggaatgaattgctgcggggaccgtttgcactctttggagtgcgcatcggagtgctaagctcgaaaagacctcgctaagcaccggcggactcccatgtcccctccgcaattgattccgcctacttccccggttcaggttatcgccgggaacggaagactcaggcgaagtttttcgcacaccggacatggaccgttccggacgctgattgtctccaaccttaaatggggagggccttgccgcggccgctgcgtgttaccggcaggctgatatcaaatcttccgcaattctttagaaaggtgcatggaaggcatatcgtatttcccgttcacggaagtgctgagtggccgcgacaaggtccgcctccacacttaaagcgtgagacattcagccgccgcaggacggcggacggggtcgatacctttggccttaagtctttcgtcccagcgaaaacctggccttggggcggaggggaagataaagtctgcggatgccattgaaatccatcgctgattagcgaggtcctgtcgagcttagcagcgcgatgcatttcacagagcgggagtggcctccgcagactttatcttcgcccgcagccccaaaccacgacaatcttcccccgggacgaaagactcatatacacaccccactaccccgtccgccggcctgcggcggcgtcctcacctgcttaattaaaatatatcttgcacaactaaaatcactttagtatacttgttaatatcccataaacataaaaaataaagaacaggtggtaacagttcgcgctgtctgaactgttacagcaggtggcagatatgatatttatcggcggaatcagttccggcatgaaacagattgaatatatgaaaacggttatctgcagcagatgcggagcgtacggaagatatcaggtctttatgacctatatgtatttcagttttttctttattccgctgttcaagtggaacaggcgtttctatgtgaagatgtcatgctgcggcgctgtctatgagctggatccggagattggccggaaactgctcagaggaatggatgcggaaatccgtgagacagatttgactttgtgccgtgacggaagcggcaatccatgggctcaggacggttctctgccggggcattcgggcaaaaggtgtccggaatgcggatatgaggcggcggaagaatttgcctattgtccgaaatgcggacgtaaactttagtaatccagccagaaaccatagtatcagcactgctgctatagtttcggaaacatgctccagagcgttttagaaaaatgagacttaagtgaaaaatgagaaaagaggtagagaagatgttaaaagcaggaattcagggaagacaggaagttatggtgacagaggacaattctgcaagcgcgcttggcagcggtcttctggaagtatttgcaacaccggccatggtggcattaatggaaaaaacggcgtggatgagcgtcgctccttatatgaatgacggtgagggaaccgtcggaacaatgctgaatataaagcatctggcggcaacaccggcaggcatgattgtctggtgcgaaagcgaattaaaagaagtagatggaagaagacttgtattccatgttgaggcttttgacgagagcggcaaaatcggtgaaggcgagcatgagaggtttatcgttaagaatgaaaagtttatggataaagcgctggcaaaaaaagaaaaataagcaatagttcagatgggggattgagaatggaggacgcgtccggaccggaccgggtccggtgtggtgagggggctggctgagtctttcgtcccggcggcccccacctgtttaactaaaaactttattgaaatttaatatttaagaataatctattcggactgctgtccatagcagtccggcgcgcttcttgaagcgccgtaatatggccgttcggccggaaaatccaaaccagattataacaaaccaaatacaggaagggcaggtggagtctatggatgcctattgaagacaaaacgttttttgattataataagaaggagacagtgaatggagaaacgaatattacagtggcaccctgcctttcaggcaatcctgcagattgaatttggtgaggaggcacagtatcttcagtttttgaaggaatataatctgactgaaaagccgctgcagatggacacactaattatcaaagcagtatctggcaggaaaataagaaagaagataggcgcttttttcaggcaatacaatatcgtggagtataaaagccccacggattatatcagcattaacgatttttacaaggtgacaggctacgcctgcgtataccagtccaataccaggcagatacttgagatatctcctgaagacatgactattactctggtcggaaatcattatcccggaaaaatgctgaattacctgaaaaaggttcacaaagccgagactacagagatgtttcccggaatttactatgttacaggcctgctgttcccgatgcaaatcctggttataggcaggctggataaaggggaaaatatctggctgagccgcttgcgggaagatctggaacttcacggggatatagagcctttaatggcggaataccggaaagaaaagcaaaatccgttatatgaggcggctatggatttaatcatccgggccaactggaaaaacagtgaggagggaaaaatgatgtgcaatgctttaagggaattatttgcggatgaacttgaagagagagaacacagagggatcgaaaaggggatcgaaaaggggattgaaaaaggaatagaaagaggaagagaggcgggaaaggcagaggcagtccttgaattgctcgaggaaaccggacctgttccggaacagctttcggccagtatcctgtcccagaccgatatgaagacactgacaaaatggctaaggcttgcggcgaaagccgaatcggcggaggcatttaaggaggccgcaggattatgaagataacatatattcatcacagttcctttctggtggagctagagcatgtatcaatgctgttcgattattacgcaggacagctgcctgagataagaaaagacaggccgctggtagtttttgccagccattttcacggagatcattttgcaccggtaatttttgatttggcaaaggacagggaggatgtgaattacgttctctctaaagacatcagcaaaaagaaggtgccggacaatctgattggcagagtaacctttgtaaaggctggggaaaagctgaccctctataccgaaggaaggaaagccgggctggagattgaaacgttcaaatccaccgatgaaggggtggctttctggattacctgcgaaggcagtaccatttaccatgccggcgatctgaacaactggtggtgggaaggtgaggacaaggcctggaaccataatatggcggcaaattacgcccatgagatggaaaagatggagggacgcaccgtggatgctgcatttgtcccattggatccgaggctggagcagtggttttatctggggatgaaggagtttatggaaaaagtcgacgcaaaggcggtaataccgatgcatttctggaaagattacagtataattgagaagatgagacagcatccgtccagtgaaggatggagggagcgtcttgtggaaattcacagagaaggagaggaacttgctatatgaaatttacatttgcacataataactttaacgtagtagatttagaaaaatccctgaaattttacgaggaggcgctgaacctgcacgaagtgcgcaggaaagaggcggcagacggcagttttatcctggtttatctgggcgacggggccacaggctaccagctggagctgacttggctcagggactgggagaaggagagctataatcttggggacaacgagttccatctggcatttgagacggatgatatggatgcgtctttaaagaaacacagggagatggactgcgtctgctacgagaatccatctatgggaatttattttatctcggatccggatggatactggctggagatagtaccggcaaaataagatgaaggagaatacggaacatgctcattaagaacggacgggtgatcgatcctgaaagcggctttgacggcctggcggatttgctgatcgaagacggaaagattaaaaagatagtaaaacgggtagacggcggggcggataatacggttcctgagagggtaaacggagcggatgaagtgctggatgcatcgggaatgattatcgctcccgggctggtagatgtgcatgtacactttcgtgatccgggcctgactcataaggaggatattgaaaccggcgccgctgcggcaaaagcgggcggatatacgacggtggtctgcatggctaatacaaatccggccgcagataatccggacacaatcggctatatcatagaaaaaggtaaaaagacagggatccacgtcctcgctgccgccgccgtgtctaaggggctgaaaggacgggagctgacggatatggatgcgcttaaagcctgcggagcggccggtttcacggacgacggtattcctttaatggatgaaaagcttgtaaagcaggcgatggagaaggccagggagcttaatctgcctctcagctttcatgaggaagatcctgcctttatcataaacaacggaatcaacaaaggcgtggtatcggatcagctgggaatcggcggttccccggctcttgccgaggattcactggtagccagggattgtatgattgcccttcataccggcgcagcggtgaatatccagcatatcagttcccggaattccgtaaaaatggttgccctggcaaaacaattgggagccgacgtttgggcagaggtaacgccgcaccactttactcttgatgaaacggctgtcttaaagcacgggacactggcaaagatgaatccgccgctgcggacggcaaaagacagggaggccctgatagaggggctaaagagcggggcaattgatataatagccacagaccatgctccccacagcagggaagaaaaggagaagccgctgacggcggctcccagcggaattatcggcctggaaacagccctgccgctggcggtcaccaacctggtaaaggagggccacctcacttacgtgcagctttttgaaaaaatgtgcctgaacccggccagactttaccgcctggattcgggccgtataaaagaaggcagtgatgcggatcttgtgatttttgatgacagggagagcttcactgtgggagacttcgtttccaagtcctccaattctccgtttaccggtgaaacgctatacggcagggtcaggtttacaatctgcggcggaaaggtggtatttgaggcttgaacagacaatataaagcgcttttgatggatgtggacgggacacttcttgattttgaccgggcggaagccgccgcattcacgaaagtattgcaaaaatacggctttgtcccggaggagcggttcattcaggagtatcacaaaatcaatcaggaatgctgggaagcatttgaaatcggacagatggagcgcgaccgcgttcttactgtccggtttgaacgcttttttggcgggcatggcctgtccatgagcggtgaggaggccgaagacgcgtaccgtgtctggctgggcgaaggggcatatctgatggagggagcggtagagatactcgattacctgaaagagcgctatcccctttacgtagtgaccaacggcgtgggagctactcagagaaaacggctgaaggcatcgggccttgataagtatttccgtgatattttcatatcggaggaggcaggcagccagaagccgcagaaggaattttttgaatattgctttgcccatatcaaggaggcggggccggaggagatgatggttattggagattctcttacatccgatattcagggaggcgtgaatgccggtatcgatacctgctggtttaatccccaggggaaggaaaacaggaaaaggatttcagttacgagggaaatacgaaggctctcggagctgaaagcattcctgtaataagaataaggagaattaaccaatgaagacaatgttaaagcgcggcgcggggatactgatgccgattttcagcctgccgtctccttatgggataggtacattcgggagcagcgcatatgaatttatagacctgttaagacaggccagacagaattactggcaggttctgccgatggggccgaccagctatggcgacagcccgtaccagtctttttcagcttttgccggtaatccttattttatcgatcttgatatgctgaaagaggaagaattgctgacacaggaggaaatcgatgcctgtttctggctggacaaacaggaagaagtaaaatatgatgcggttttttattaccgctttccactgctgaaaaaggcgtacacaagaagtttacataaaacgacggaagcataccggcagttttgtgagaaaaatcagttttggctgccggattacagcctttatatggctttgaaaaaacatttcggtgacaatgaatggctggcgtgggaggaggatgccagattcagaaagcctgaagccatggagaaatataaaacagaactgaaagaggagatagattactggaaattccttcagtataaattttttgaacaatgggaaaaactcaaaaagtatgcgtcagataacgatgttaaaatcgtcggggatatccccatttacgttgcgctcgacagtgcggacgtctggagccacccggaacttttccagctggatgaggaaggccttataccgctgaaggtggccggagtgccaccggacgcgttttccgatgagggccagttatggggcaaccctctttataactgggataaaatggagaaaacgggatttgcctggtggaaagagaggatgaaggcgtcatccgctctctacgatgtaatccgcatcgatcactttatcggagtggttcagtattattccatcccgtatggtgcggaaaatgccaaatcagggaagtgggaaaaagggccgggaaagaaactgacggatgccataagcgaagcggttggggcgacaaaaatcatagccgaggatcttggaattttcagccaggatgtcaaggatctgctggctgaaaccggatatccgggaatgaagataattgaatttgcattcagcggggaccgcttcaatgagcatcttccccattgctatgaaccgaattccgtcgtatatggaggcacccatgacaatgaaacgcttgccggttactttaaaacagagaagaggcagtggtgggagctgcagtatattgccgactatctgggagccgcacatcagagcgaggttgtggataaagtattccgggcggcttacggttcggtggccagtgtggcagtatttcagatgcaggatgtgctgaagctggataactgggccaggatgaacacaccgagtacggtggggaaaaactggagatggaggatgaagccggggcagtttggagaggaacagacgggttacctggcatggctggtcgatacattcggccgtttccaggaaggccgttaagtctgaactagaatcaataaagacaggaaggttactatgttcagccgttatttggcgaggctgcgaatagtaacacgggaggtgataatatgtgcagaaaaatcatgaacagatttgcattgctgctgcttctgacagcggccgttgccctgatgacggcaggctgcggtaaaaaaacggatcctgccgggacaggacagcccacggggaagagacggtaccttccggggcggaaaacgaaagtacggaagacccgaggataatgccggagcttcaatcggaggatgatatcggtattttctgcggcactgtcaaggatgccggaatgaatacgatggtggttgcgaataaagaatatccggacggcgtcgtgtttgcaaaagaggatgcggccgtaagcctggtggacggactgcttctggaacacgaggtcacggtcttctaccgggggaagatagatttgtcctcttcaagcggtgtaaaggcagagcttgtaagagaccccagggacggagataaagactgccgggcgggcgtggtatcgggagaagtccttggagtcggtatgagtgttatcacaatcaagaccggggcagggacagaggtttcatttgaacaggaacccaagccggttaacctcacaagcgggccgctggagggtgataaagtgacgattttttattcccataagccgggggagacaatctacgtgccggagctgattcagtgatttgaaagcggcaaagatgcaaagaaactgccaaacggcggcaggttagagtttgataatcacaattgaataagatgggcggcgtggcaaaaggagagaagtcagcattgattgacttctctccttttgtagtgcgcctggcggcgcacgtcactaacggatgaaagttccgaatccaccctggtagtgggaagatagccacacctcgcggaatagtggccgtgaatagtaacgagataagtaacggatcatggtgcctgaactggttctttacggttcggccttctccatttcaatcgtatatttctcataagcattgatcacaacggtatccccgtaaacagaactgcgcttaaatttcccgccgtaattagcatggacatggccatggataaagtaggccggtttatatttttccagcagccggttaaaggcctggaaaccggtgtgcggaatatcttccccgtcattgaaccgataggccggagcatgggttacgagaatgtcgaagcccctgttcagagccagctttggccacagccggaatactcgccgattcatggcgttctgggtatactggttgaggccgtcacggtagcgcagggagcctcccaatcccagaatcctgattcctttatagttataaattgtatcttctatacagatgcagccttccgggggcgtctgttcatagcagtcatcgtggtttccatggacatagaggaccggggcatgggtaaaggtcgccaggaatgagaggtattgaggagccagatcgccgcaggagattatcagatccaccccctcaagtttggccttttcaaaataatcccacagagatcgtgattcctggtcggccaatgtcagtattttcatcaaatcgttcctccgtctttcggctttctgagaccctgaaggcggactaccggccttgcttcgtctgccagcatttcaaaatcaggtatggagccgatgacattatcggccagccagttcatcgtgataatctcttcgggagccagcgtatgatcgtcatctttttgtatcatcccgtcctgggaatacagcgttccggaaaacggatggaaggagccggattccacggcacggcgcatgaattccaccagctttttcgttccggctgccagattctgggtatagatgatatcaacgacacctgccgacaggccccaccagtaatttagggctctgctgtcggatgattcattatcatgccaggaaccgctgataatgctcgttatgatcttctcgtaaaattttccccagttccaaagcggagtggccgcattaaacggcatggttccgtcggccgcattttcaaaccggtataaaccgaactggcgtgaagcgaaccgcgggattatcatatcctggctggatacatatgagatgtggtgtttcctgaaatattcaacaatgtcatcctctttgacggtggaccatttcagaaaaatctcggctcttggatttaccatgcgtgcgccaagcgcaaaggcattgatattggcagtcatgccgtaaatcgggtaatcggcgatgtagccgatacggttgttgtctgccagagtccctgctatcatgccgcagagaaatttggcctcatacattcgtccgtagtaagtccttatgtagcggtgggaagtgttcagggagcagttgagaattctgacatcgggatactccactgcggttttcaggctggagggaataaattcgggcgttgtggtgaagataatgccgcacccttcgtcaaccgcccgtttaattgcctcctgggctttatcaccggccgtgacattgtctatacagatggtttccacctggtttttaaatacttcttccacatggcgcctgcccagctcatgggcgtaggtccagctggaggaagctgcgtttttggaatggataaatgcgatcttcacctgtttcggagacggcggaagcaggatatcgataaactttttctttggggcggtgcctacgggatccatgaccagttcgacggactgcttctctttcaacagagtaaattcgtcccagatctttgcgatattttctctgattttagagggcgggtcatctcttaaggctggataaccgtaaatatcgaggtaggacagaagggcgtcaccggtcttgattggcaggcgtccgcctcctctggccagataggcgctgtggaatttgacataggcagcagaaaaatccatccgggtctcttcgtcccagggaattttgcttccgccggcaacagcagcggacaggcggggaaagacgccttccctgccggccaggatatagttgattcccgtaagacggtgaaaatccatatattcataataaataatattgtcggtttcctttgtcctgcgcggtatgaaacgcgttacgacagcgggaataaagggagcgtcaaaatatttcaggacactgacccgcttgtttccttccacgatataaaagtgtcccataaattcgcaggcggtcactggttccctgataccttctttcagatgggagccgcagagattgatccatttggcggcaaattccgaatgcggatccagaaggggcatataattaggcgcaaaggctgtcctgcggccgatacttcttgttcccgctatcagctccgacggaatctgctgtaaacctaagcttacttccgatacgatatcaatatgggaaatactttcgtccagagcctgcagataaggatagcttccctcggccaggtgccgctgatactccttcttacccgctttataagctttagaataatcgtcgaaagacataatatacctccagtccggattttgtttttacgctattttgagtataacacaggaagaggacggctgcaatgtgtctggtgggactgtagatggagatttaactgaggttgggaggacgcgtccggaacggaccatgtccggtgtggtgaggggggctggctgagtcttccgtccccgtgggaagttggttgtggagggggaatccggccggaatgaattgctgcggggaccgtttgcactctttggagtgcgcatcggagtgctaagctcgaaaagacctcgctaagcaccggcggactcccatgtcccctccgcaattgattccgcctacttccccgggtcagtttttcaccggggacggaacactcaggcggaggttttcgacaccggacatggtccgttccgggcgctgattgtctccaaccttaaatggggagggccctgtcgcggccactacgtgtttccgcaggcagataccaaatctagcgccttttataaaggcgcaatgaaggcatatcgtatttcccgtacacggtagcactgagtggccgcgacaaggtccgcccccgcacttaacgcgtgagacaatcagcggccgcaggccggcggacagggccgataccccggcggagtctttcgtcccggcgaaaacctggccttggggcggaggggaagataaagtctgcggatgccgttgaaatccatcgctgattagcgaggtcctgtcgagcttagcagcgcgatgcatttcacagagcgggagtgtgctccgcagactttatcttcgcccgcagccccataccacaacaatcttcccccgagacgaaagactcataaccccaccccaccaccccgtccgctggcctgcggcggcgtcctcacctgcttaattaaatctccattcagctgcgcaacccctttgtttttcagggattttacgaaaagggtacttgcaaaataataattttcctgtaaaatagaagagacgcagtcgggaatgagcggcaaggcccgcctgttgcaactcagaacataaaatgacagacaatcagtaagcataaattgaaagcagtgcattatgaaaggaaacagatatgattagcacaagtaatgtaacgttgcgcgtaggaaaaaaggcattgtttgaagatgtcagcattaaatttgtagaaggaaactgttatggaatgatcggagcaaacggagccggcaagtccacatttttaagaatcctgtcggggcagcttgagccgaccagcggagatgtcattattactccgggacagaggctgtctttcctgcagcaggatcattttaaatatgatgcatacacggttctcgataccgttatcatgggtaatgccagactgtatgagatcatgaaagaaaaagaagccatttacatgaaggaagacttcacggatgaagacggaatcaaagcggccgatctggaaggcgagtttgccacgatgaacggctgggaggcggagtccgatgccgccaacctgttaaatggacttggtattgatacggagcatcattataagctgatgagtgaaatgatcggtcctctgaaggtgaaagtacttcttgcacaggcattatttgggaacccggatattcttctgctcgacgagccgacgaaccacctggatctggatgccattgcctggctggaggaattcctgattaattttgagaataccgttatcgtagtatcccatgacaggtatttcctcaacaaggtctgcactcagattgccgatatcgactatggcaagattcagctctatgcaggaaactatgacttctggtatgaatcaagccagttgatgattaagcagatgaaggaagccaataagaagaaggaagataaaattaaggaactgcaggaatttatccagcgtttctcagcgaatgcttccaaatccaaacaggcgacttcaagaaagagggcgctcgagaaaattgagctggacgagatccgtccctccagccgtaaatatccgtacatcgatttccgccctgaccgtgagattggcaatgaagtgctgtgtgtggagaacctcaccaaaacaatcgacggcgtaaaagtattagacggaatttcatttattctgaacagggaagacaaggtcgccctggtaggaccgaacgagctggcgaagacagttctgttcaagatactggccggagagatggagccggatgaaggaagctacaaatgggggcttaccacgtcccaggcgtatttcccgaaggataacagcgccgagtttgacaacgacgatacgattgtggactggcttacacagtattcccctgtcaaggatgtaacttatgtccgcggattcctgggaaggatgctgtttgccggagaggacggagtgaagaaagtgaaagttctttccggaggagagaaagtgcgctgcatgctttcaaagatgatgatttccggcgccaacgtcctgatattcgatgagccgaccgaccatctggatatggagtcaatcacagccctgaataacggtatgactaagttcccgggtgtagttatcttctcgtcacgtgaccatcagattgtggagacgacggcaaaccgaatcatggagattgtgaacggtaaactgattgataagattaccacatacgatgaatatctggcaagcgatgagatggcaagaaaacgtcaggtatttaccgtaacagacagccaggaagaggatgattaatgttactgttcacagccccgcggcgtgaccttaaactcgggctttttgcccccgtgctttagatgtaaaaatatagtgtgcctacaatttaaggcaggtgttccgtgatgggaacacctgcctttattgaaggcggtgacctgtgcgcagggcatgcaggttatcgttattggattggatttttagtcttgtcatcttttttcaatttttctgtgttttccatgtaagtaagataattaacgtaatccaccagcagccgtttcgatttgctgttgaatgaatctattctgcatacaaaatccccaattgttacattctgaatcagggaatttgaaaattcaggggcgattttgggataatcgatccggcccagcagataatccgtgctgacattgtagtaggaagacaaattcagcagatgccgcacaggaagttcggttttgttggtctcgtaccgcgagtatatttgctgtgttgtaccaattactttagatatatcttcctgggtttttccattcttttcacgtaaaaggcggagccgctctcccagaattcccatgccatcacctctgattctactagcttacaaaaaacagttgtagaaccaatttatcatacattgaaaatattgtatttcattactcgagaaatgatgtatagaacttgatttttactcataatatttgtaaaatggaaatcagatcgctactattatcttttcacacggtcagcgcagccaatgcgcagatctgtctgaactgctgcagtcagcggctctttccggataaatcttttctgtattgggccggtgtttttccggactcccgtttgaatacctgggcgaagtaggactgggaggaaaatccggtaagagaggcaatctgggcgatggaatgatcggtggtaagcagcagttccttgctgatttcgatacgccgcgcattcaggtagttaataggggacaggccggaataccgggtaaatgcatggaccagatagtatttgctcatatgtgtcagcgaggctagctgatccagagtaatgctgtctgcaaaattagaatccaggtaccgcttaatctgactgcactcctttgtcatcctggacggggtgaagtgagccggaagaagctcctgcttccggacaaggcggatcagcaggacatccagaagagcctggcaggctgcgccgtaaccggccttctgttcttccgcctcctccagtaagagaagcaggatggacagaagctccgtatctgttccataatggcagataaagaaccgttccaggtttttgttatcgcggaaggcgattccgctcacacccacggcaatatactccaggggatagcagtcaaaagaaagttccgtatgctccatgtcaggcggaataataatcaaatctccttcgctcacctgatattttttgccttccagcgcgaagaatcccctgccctccgtaatgtagataagctcagagaagtgatggatatggggaatgctctgccagtcattttcatattttgaggtggaaatgtacagaaggctggcggtcagtttctcaaagtcttcattattaaaaatgtatcggctgctgctcataaaagtacctccaaataggaatgttaagaaaattatagaaaaaataaagagatttgtaaatatcaggttgaaaaatgtcgatgcaggagcaataattataaaaaagctgacaagaatctgctagcgtcagcaggtcagaatgaatataatgttactaatcagccgtaaccgccataaaaatcattttatcggcaaaaaagtccgggctgcgcagttagaattaagaggtgaactacaaaggatttcaggaggatactgaatgatgaaagttagaggaagacttacactgcctacagacgtagatatggtggaagagacactgaagttaaaagaaaggcttgatgccgatgcactgagagattgtgacggcacacagatgccttccgaacttttaaaaactggtgcaaaaatttacgcaacctattatacaacccgcaaagataacgaatgggcgaagaacaacccggaggaagtacagcaggaatatctgatcacggatcgcatcacggctaccagctggacgctttccattgaactgatgaagggattccacacacagcagctgaaggtcaacacgatagatgagccaaagcgctggtgggaggtcatagacaggacaaccggcaaggtggtccctgtagaaaactggttttacgatgaagcaaccggagaagtgattatcaagagtatcccatatcaccagtatacggttagcttcctggcttttttgatctgggatccggttcatatgtataattacctgacgaatgactggcagggggccgaacatcagatgacctttgatgtacgccagccgaagacacaggcatatgtaaaagagaagctgagaagctggtgcgaggaaaatccggatgtggacgtagtgcggtttaccaccttcttccatcagtttaccctgacctttgatgaccagaagcgtgagaagtatgtggaatggttcggctacagcgccagtgttagtccctacatactggagcagtttgagcattgggcaggctacaggttccgtcctgaatatatcgtggatcagggatattttaattcaaccttccgcgttccttcgaaggaattcagggactttatcgaatttcagcaaatagaggtcagcaggctggccaaagacctggtggacattgtccatgcctacggcaaagaagccatgatgttcctgggagatcactggatcggaacggaaccgttcggcaaatactttgacaacatcggtctggatgccgtggtaggttctgtcggagacggagttacaatgaggatgatatccgatatcaagggtgttaattacacggagggccgtcttcttccatatttcttcccggatgtatttacggagggaggggatccgatcggggaggcacaggataactggatgaaggccaggagagcgattctgcgatctccgctggaccggattggatacggtggttatctgaagctggcttccgagtggcccggctttatcgaacagatagaaaaggtggtcggtgaattccgccagattcatgaggcaatggagggaaccagctcctatatggcgccgtttaaggtggcaatcttaaattgctggggagaactgcgcagatggatgtgcaaccaggttcaccacgcgatctggcacagggaaatttattcctacgtgggggtgattgaatgcctgagcggaatgccggtggaagtacagttcataagctttgacgacgtccgtaacggaattgaccctgatattaaagtgattatcaatgccggagatgcgtatacggcctggagcggagcggagaactggacggatgagaaagtagttacggctatacgccgcttcgttgaccagggaggcggatttatcggcgtgggtgagccgactgcctgccagtatgagggccggtacttccagttaagtgatgttcttggggccgacagagagatgggattctccatgagcacagataaatacaatgaactttccccaaaatacagagaccattttatattggaagatataaaaggtgagattgatttcggggagggcaagaaccggatttatgcccagggcgccaattatgagatccttgatatggatggagagtacagcaggctgattgtaaacagctatgggaaaggacgcagcgtttacttcacaggtcttccatattcgccccagaactgcagaatcctcctaagggctatctactatgccgcccacagggaagaagagatgaagaaatattatgtgacgaatgtggaaacggaagttgccgcatttgaaaaagccggccgcgttgccgtaattaacaattcgaaagaggatcagatgaccgacctctatatccatggctcgctgaaatgcagtttggatatgaaggcaatggagatggtctgggttgagatttaggagtgcagaggcggacatccggatatgggccgactgaggccggttcaggttcttcggtacattccggcggtgccgctctgtatcaggccgctgcctgaaaagataaggaaataaaaaccttatcttttcaggcttttttattttacaggaatttctcctgttaaataaaaaccgctctgcggaggctcgcaactctaaagagggcttgttcacttagcgggattctttcttggcttaatgatattcaataattgaatgtataccataagtattattcagttgcttaatagataaaaccatcctattatgaagatacaaatagtttttgcgatacggaactcgagcagaaaatattaatttcaaaaaggaaaggaagaaggttatcatggcaaacaaaaaagttgaaattatgattgatgatgtcaggcttgttgcggagctttatgttgatgatgctccgattatctgtaacatgattttgaacaatccgggacagagggcaatcatccagcacgcaaagctgaacgggcagttattcttcggcacgcttccctatgcctgtggatttgagaaccagtgcaggggaggagacttaaaaacatttgatctggcatactaccctcccaggaaccagctctgtttcctgtacggagtagggactgacgagccgctgcctatcagccgcattggccgtattgtagaggggatggaggccatgcaggttgttggaatcaagaactggttaaagcagggcagcatgatgacaattaccggtgaagtagaataaggaggtgcacataatgaactggaaggcagcgattgacaaatttgaagagagacgtcttgcaatctgggaaaatatgccgcaggatgtttatgatttgagtggcggtaaggtgccgggcgatacgaatgtatatggacagtatgtcacaacgatgatgtacgcagattcagaactcagaacactgtgtgatgaagtccttttttatatgatagagacggcgaaagagggtgatgtggatctgcgcacattgattcactttgcaaaacgcatactggattataaagcaaaattctttgtgtttaccggtgttcctatggcaagtgagcttttatttatgtatctggaagcgctagattcggttgaaacactggaggagtttgtacatctgagtaatgcggcgcttaaatattttaaccgccatcatatgtgggtggatctcatcataccgtggggcgtttataacggttttgcaaaacaggattttgcacagtatctgtaagtaatacgtcataatataacagtaacagacaggcggcgttccctattcccacacgggaaaacaggaacgccgttttagtccctcctatcagcacactggtatgtgcgggttttttaaactttgtaatccacgggtacttatctaatatttgaatttctgataaatcaacataatcacagcagcggctttttgcatttcatattccaagatattcctttgtaatagaaataaattcctcggcagcaggggaggcatgtttaatggatcggatggcaaggcccaggatccggcaatgatcgcggatcagaggcttggtgacaatattatcgaaccggaagggcagagccagttcaggaatcagggagacacccagattctggccaatcatggaaagggtagccatatctcccttgatacggaatttaatctcagggttcagtttttccgcgttcattacctgccagacatcctcgtcgcctccctcgtgcgggataataaatgggtattttaccaaatcggcaggatctaccttttcacagccggccaaaggatgctcaatggggagaaccgcgaggatcgtatccttatacagcgggataaagtcataattttcgggcaccggcatggacatgagaccgatatcgattttaccgttcgtcagccattcctccagatcataatgatttccttcaaaaacctgcagcctgacaccgggatgaagggaagaaaaacgggagacaatgggcgggacccacttgacggaggcgctgtagaaagcccccaccctcagggaaccgatttcaatcccccggattttacatgaaatttccttcagcgtttcatcggcagacacaatctgctgcatgtaataaatcaaaggttttgcattttccgttgggaaaacgccatccttgccgcgtatcagaagaggaaaccccatctctttttccagggaggaaatcatatggctgattcccggctgggtatagaccagggcttccgctgcttttgtgagactgccgtactctactgccttcaaaaatgcgctgtatttcaatatactcatcgtctgtcaccctcattcaattttgtaatgtaatccataataattattcaattgcttaatgcgttgaaataatataccatacatttatagataattcaacacaaatcgacaaaaatatcaagcaactatgatgcaaagcaaaagaaaaacaatatttcggcagagtctatacggataacagataaaatggtgccgcaggataaaggattggaggagacgcatgaagaagattatcaacagaccggaacaggttgtcacggagatgtgtcaggggatggcgcttgcacacccggaattactgtactcagaaaagcaccggtttataacgagaaaaaagctgagtcaggataaggtgacattgataagcggcggtggaagcggccatgaacctgcccatgctggctttgtgggggagggcatgctggatgcagccgtctgcggcgatgtttttgcttctccatcccagatacaggtatatcaggcaatcagagagacaaaaagcagaaaaggcactcttttgattataaaaaactacagcggagatatgatgaactttaaaaatgcggcgtatatggcaggcgaggacggaattcaggtggactatgttaaagtggatgacgatatcgcggtgcaggacagcctctatacggtgggccggcgcggggtggccgggacggtctttgtacataaaattgcaggcgcagcggcattagccggatgtaatctggaagaagtgaaggctattgcccaaagaacggcatcatcggtaaaatcaatcggttttgccttcacctcctgtaccgtgccggctaagggaacgccaacatttgatatcggggaggatgagatggagtatggtgtcggcatacatggagaaccgggaatcagacgggaaaaacagcaggatgcggacacagttgccgaaagaatggtctcgcagcttttagaggcgcttgggatatcagaacagtctgaggaagaaattgcagtccttgtaaacggacttggagggacgcccatgcaggaattatatgtcctgaaccgttccgtacggaaagcgctggcagagaggggaatcaggaaggcgtataccctggtgggaaattttatgaccagcattgatatgatgggggcctctctgtcgatattgaagctggattctgaaattaaaaaatatctgtttgccccttgtcagactccggcgctcaaaatagacggcgaaccggaactggaagagtttgggctgtcggagtgcaaaacggtacgtgacaaagcgccggataaaaccggaaagaaccggggaacaggaataatcaaagacgaagaaatatctctacacaatatgatttttatgatagattgtataggaggatatatcatccaaaatgaagttcctttctgtgaattagattcacacgctggggacggcgatttcgggatgagtgtggcaaaaggatttagggcgcttgaaagagaatgggaagaggtgattgcggagtcagacgatatcgcttcatttctgaacgcctgttccctgattatcatggaaaactgcggcggtgcttccgggccaatttggggatcggctttccgggctgcatctaaagcggcggaaggaaagaaaacactgaacgctgcagatatggcagaagtgcttgcaaaggcggtgcagggaatccaggcgaccggagcgcgttcctttggacgaggggccgttcccggagacaagaccctgatcgatgccctggttccctgtgcagatacttggaaacagctggcagcggagggaacccctatactccggatctttacgcaggcagcaaaagcagcggaagaaggggcggaaagcacaaagaaaattgtagccagaatggggcgggcaggtacagtgggtgagaggagcctcggatatccggatgcaggcgcctacgctctgggggcaattttcagggagctggcccgcaggctggagcaggcctgagcctttgtttctgccggagggcgtttgaaaattcagacaatgaaactgtaaagactataattgatacagggccggagggtgaaaagatggactatcaacttgaattaattgacgtagcaaaacagtataaggaatttcttgcggtggacagcgtaaatctgcagatagaaaaaggagaaatcgtctcttttctcggtgccagcggctgcggtaaaacaacgacactgcggatgattgccggactgatcgaaccgaccaggggaacgatccgtattcagggccgtgatatgaacggaattcctccccataaaagggatatctccatggtatttcaaaactatgcgctgtttccccatctcagtgtatatgaaaacattgtttacggactgaagacgagaaaaattaaagataagaaggttctgatggagaaagcaagggagatgatgaatttagttcagcttgaaggtgtggaaaacaggctgcccaaggaactgtccggtggtcagcagcagagagtgtcgctggcaagagccatgattgtagagccgaaagtgatgctgtttgacgaaccgctgagtaatctggatgccaagctgagggaaaaaacgagagtggaaatcaggaatctgctgaagaaaatgaatgtcacggccatttatgttacccatgatcaggaggaggccctcaccatctcagaccggatagccgtcatgaataaaggccggatagaacagatcacggaaccaagcagtctttacacccgtcccgcaacccggttcatagccggcttcgtgggccatgccaatattgtggaaggcagtgtgacaaaggctacggaggacagatttgccgttaagcttacaagcggtgaagaaatctgggcaaaggcggatccggttaaaaaggcgtcggccggagatggggctgtcctgatcataagaccggaaaatatccgtctccatgatgaaaaaccggacaagagcaatattctttccggaacggtaaaagcaaaaatttatttgggttcgactttgcgttatgtgatcgaaatggcgggaaataatgattttgaagtggatcttcacaccaaggatgagggaagggctgttgagggtgacatgatatatctggaactcgacgaaaatggactgatcctggttgaaagatagagaatgagaggagaggaacaaatgaaaaaacaaatcaaatcggttatggcactgttgatggcaggtatgctgacagcatgcggttcttccggcgcttcggaaagtcccgcaaaaacccctgatacggaagctccgtctgcggcggaggccggcacacaggacgcaggtacggaaagcaaagatacgggcacggcagattattccggtgagactctggtagtccaggtctggggcggaacttatgaagaaacactcagaaactacataattcctgccttcgagaagaagacgggggctaaggttgaagtcgtaagcggtgcggctccgctttcccagctggccacggagggtgatgcggcttccatcgacgtgcttcacgtggactgcagtgaagttgtacagggaacgaatatggatgtactggagacactcgatttcagcaagatgtcaaacgcgccggatttatatgaggaagcccatatgtatgacacggcggttgtgacgaactggggcacctacggtattatataccgcagggatcttgtggaaaaagaacccgtgagctggctggatctctgggatgatgcctacaagggcggaaaaatcggcgttattgattacagcatgggcggcggtctggaatttgcggaagcaatttcacgtatccagggatatacgttggcagatcaagagaactgggataatctgtttgcaaagctgtcctccctgaaaccaaacatcggtgtttatgcaagtcagcactctgatatcgagagcatgctcagcaacggagacatcgtcatgtctgttgagacaaacggccgtgccatcggcctgatgaaggagggctatgatatcggcttctgccagccggaagaaggctctattgcaatgacatctctggctgccataagtaaaggctccacaaagaaggaactggcatatttatttgtaaacgaactgatttcaccggaaggacagaaagcctatgcggaaaataattactatgctccttccaacggaaaaaccgtgattgcggaagaactccgcgaatatatgccatacggccaggaacaggtatccaaactgctttatatggattctgagacgctggaaccggttaaagcggcgcttattgagagatggaataaagaatttaaataagcaggtgaggacgccgccgcaggccagcggccgctgagtgtctcacacgttaagtgcggggcggaccttgtcgcggccccgcaccacaccggacatggtacgttccggacgcgtcctccgggcctcagttaaatctccaaagtacagaaagagaggtatttccatggatagagaaaaagacacatggtcttatgtgaataaatggtacttaattattcccctggctttcctgacatttttctttgtcgctccgctggttaaaatgttctatctgagcctttttcaatttaacggggtcaacaaaccgttgggagcgtttaccctgtccaactatgataaatttttaaaagacggatattactggggtgtccttggaaagacggtcggactcagctttttatcggcaatcatctgcgttatcctcggatatcctatttcatatcatctcagcagaatgcaggggaagaagaaaagtatcattacggccatggtcatgctgcctctctgggtttcgatcacggtccgaatgttcggactgatgacgatgattgagtgcggtacatatcttgccgttgagattgggctggtctactgcggcctgccctacatgattatgatactgacagggccaatcggaaatgtgagccaaagtgttgaagaggcatcgtacgtatgcggagccggtttctgggaaacattttttaaaattacatttccactgacaatcaaaggcgtaatttcaggatttatgcttgtatttgcattaaatacagcggctttcgtcgtgccggtcatgctgggaagcgggaaaattgtcaccatgaccaccctgatttaccagcaggcaacttatatttatgactggggctttgcggctgcgatttccgtaatttttctgatcgtatccatggctcttacaaattcaggaaaactgtatgatatttactgtgaaaaaagggcggaacgttcttccagaatattgagagatgagcttcgcagagagggggaataagatgaattttactaaaattgcggggaaggtattcagaagtcttgtatatatgtttttgctctgccctctctgtgtagtgatctgtacggccttcagtgatacgaacagagttattttcccgccccggggatttacgctcaaatggttcgggagagcctttgccaacacggaattcctgagctctttgattttgagcgtaaagatagcctgcgtcagcgttgttatagcctgcgtactgggaacgatggtgagcctctggttctggaagtccggcagcagggtaaaagggatttttgagacgatttttttatcgccaatcgtcattccgactatcatcagcgccgttgcatttttgcagtactttgccattttcggaaatatgttcacgaactattggaagttgtgcctgacttatgcgatcatagaaattccctatgtcatcagaaccgtcacggccaatctggtgggacttgataccggattcgaggaggcttccctggtacttggcgcttcgccggtcagaactttgttcaaggtcacgcttccatgtatccgccagggaatcatcggcggagccgttttctcctttgtcgtcgcctttgacgaatgcgttattatcatgttcatgaagagcgctaagacagtaaccttcccgctccgtctttattcttatataactgagtcgttcaccccgctcatatcggcttttgcaaccctgtttattatcgttgcaggggtagtaatctatattgtggaacgcaagattggactcagcaagctttactgaccggttctgcggccctgtacggttttcctgtacggcaatggccctccataccgcatgggtcggccaaagcgccgtaatgcggtaaaataaattcccggaataaacttgccgttattccgggaattttgacgttcactggggctaaggaagtatggcgataaagtgactgcactgcggcggcaggcaattatgcagccgaagcgccctccgcaggcagagaatccctcgagcggtattcttactcaaggaatatatacccataatatgggtattgacgtacccataatttaggtatatgggaaaagcatacctgatataataacttcagaggtgtgcaatgggaaagaaaacgtcagtggaagatttattaaaggcagatggcaaattaaaggaattacgcaaaaggcgcaacttaatacaggagcagctggctgatgagataggaacatctcagcagacggtcagccgcgttgaaaaagataaattatcaatgtcgattgaaactttgatacgtcttaccgtttatttcaatgtttctgctgattacatgctgggaatttccgatctggttcagccggaagactccattaaaatccatgaactggtccagctttacagaggccttaatgaacgtgataaggaattggtatacagtcaggtaaaaagaatgcatgaactggatcggaaaaagaagaattagccccggccggttatatcctttgggaaaccggctgaattgacataaaatctaaatcaactcgaaatcaaatcgaaaaactcatttccaatcaagataataatttcccgaaaaaaaacgtatagcaggacagtaccgccctataaatgttttcgctgcggtctctttgccctcagcataatcgacgctcggtattcggtcggcgtcatgtctgtgagctttttgaactgtcttgaaaaataatgaaccgaggtgtagccgagcgcatccgcaatctgggtaaaattcatctgctggttacgaatcatctgtttggccgcgtttattttcatctggttgaagcattccatcacgccgctaccctggtaggtgcggaataatttcttaagctgggacacgccgatcagattgtcccggcatattttttctaccgtaagcgactttcctatatttctgtcaaggtaatccaggatgtcggagaacagttcatttccgtctgccagtgccggagactttccgggagcgtgagcgccgtttagcttatggttctccccgaaagcgagcgtgcctgagaagttgcggaacaactggattaaaaactgctccagatggattttgatcatctgctccgccccgaaggggatactttccctgcggctcagaacctccatatagggatcatccatcggtccgtcgaaggtctcacgggcctcggcaataatctgagaaagaagattgcgttcactttccccgacagtcagtatcttatgctcaaagaaagccatgcagggttcacccgcttcaaaggagatgaccacaaggttcggcgcgataacattattggcggccagtgcgtggaactcattggggcggtgaaagataatctgcccctgtctcaaaatgaatttctcacgatctgccgttacctggagttcccccttatccacataaagaaattcccagaaattatgggactcgccggggaaggtaaaatcactcatatattcgaagtagtggaggctcacgatcttcttgatgatcagctcctcctttaattcggtaaactggtaagacatgccgcctcctgactgtgattgctgttttgactgctgctctttcgaaaaagtggatcggttattggcctgaactgttaattatcattttttacattttaaaccacagattgctccatgtaaagaataaaagaactaaaagtgcaaaaaaggaaacgttttgtataaagaaatttggcaattagtataatatcatagagatatgaattgcactaaatgtgaaaattcactaaaagtgttaaggaggaagattttatgaaaaaaagaacattaagcgtacttctgacggcggctatggcagtttccatgctcgcaggctgcggcagcaagacagaggctccggctgaaacagctccggcagcaacccaggaggcaggcggtgaagcaggcggggagacagcagctccggccgaaggcggaacactggtttactggtcaatgtgggagtccacggaaccgcaggggcaggctatccagaaagcaatcgatgccttcacagcagagacaggcatcaaggtagacgcacagttcaaaggacgtaccggtattcgtgaaggtttacagccggctcttgacgcgggaaccaacatcgatttatttgacgaagatatcgaccgtgtcaacaagacatggggacagtacctattagatctggaagatttggcaaaggcagccgactatgaggcgacggctaatgcaggactgattggcgcatgccgtgaggtaggcgacggaacattaaaatccattccttaccagccaaacgtatttgcaatgttctacaaccagtcaatttttgacgaagccggtgttacggcagttccgactacatgggaagagctggatgcggcttgtgcaaagattaaagaggccggatatgttccgattacagatgacgacgcatacatcacctgcttattcggttatcatatgtgccgtctggtaggatatgagagaacatccgagattgttaagaacggcgaatgggatgacccggcagttcttaagacagcagaagcttttgcagatttcgcaaagaaaggctacttctccgagaatatcgcttccaacgtatggccggcaggtcagaacatggaactggcaggcggaacggcagctatgtacttaaacggctcctggcttccgaacgaagttcaggctatggcaggcgacgatttcaaatggggatgcttcagctatccggcagttgaaggcggagtagacggaacaaacgcatccaactacggcgctcaggtattcgccatcaacaagaattccaagaatgcagaggcagcgttccagttaatctgcaagattaccaagggtgaatttgaccaggttctggctgaagagagcaatggtatcccggcagatacaaccaatacagagtggccggcaatggtacagtgtgcacagccggttatggaacagctcacagttcgttatccttgggcagcaggcgcagaagataatgcagacatgacaccaatcatcaaagaaaacatgcttaaactggttggcggcagcatttcagctcaggaatttgtcgatgcattaaagaaataaaaactaaaaatacaattcataacggagtagaagcgtccgcgcttgaatgaaagactactgaaatgaagaattacatggtggcatcgataaaattcatcgctgtcaccatgtttttatagaaattctaaaaaaagataaaagggggaaacggcttgaagaagaataaagcaatgattgtcactttcctggctccggcattatttatgtttattatggtattcctgtaccccatctgccggaccgttgtgatgagcttctttaaaatagaaggaatcacggattcattttcgaagtggcagtttaccggaattgacaattatgttaaacttatgaataccacactgtttaaaacctctatgtggaacctgttccgcatctggtttatcggagggatcatcgttatgtctctggcgctcttatttgcggttatcctcaccagcggaatccgtttcaagagttttttcagagctatgatttacctgccgaacgtggtcagtgcggtggctctggcgacgatgtggctccagtatgtgtacaataaccagtacggccttttgtcgggagtctttaaaaagctgggactgacatcactggccaagattcaatggctggacagtgatcacaaattttatgctcttttgtttgcctactgttttggtatggtaggataccatatgctgattttcgccagcggtattgagcgtatcagcgaagattattacgaagcggcgactctggacggagctaataagctgggccagttccgctacataacactgcctcttttaaagggcgtatttaagacgaatattaccatgtggagcgtaacttccgtaggatttttcgtgtggtcgcagctgttctcctccgttacggcggataatcagacgatcactccgatggtttatctgtatatgcagatcttcggcgccggcaacagtgtgacggagcgtaactccggtctcggtgcggcagtcggcgttatgctgagtgtctgcgttgttctcatcttctggctgtgcaaccatctgctgaaagatgatgatctggaattctaaaaggaggggaagttatggcgaaagaaaagaaagtgcgcgaacgcgttaactggaacagagaactgaaacttgcccccggctacctgattctttgtctctggattttatttaccgttgtattactgggctgggtggtgggcgccagcttttcaacaacaaaggcgattttctcaggaaagattatgtccagcggttttcatttggaaaattatgcaaaggcatggaataactcaaatgtttccacctttttcatgaattcgctgggatattcgatcatctcctgtacgctgctgattctgatttgtgctccggccgcatacgttctgtcacgttttaagtttatcagcaataaagtaatacagaccggttttgtatcggccatgggcgttccggttgttatgattgtgctccctctgttcggccttgtggcgggcatggatcttctgaaccacgaattgtctaaccggctggtactgatatttttgtatgtgggaattaatgtgccgtatacaacgatttttcttctgaccttctttgccaatatatcaagggcatttgaagaggcggcggctattgacgggtgttcacccacgaaaacgttctggctgattatgctgccgatggcacagccgggtatcatcactgttacaatttttaattttatcaatgtatggaacgaatactttatatcccttattttcggaaactccgaccggatccgccctgttgcggtaggactgtactccatgatcaattccatgaagtatacgggcgactgggccggtatgtttgcggcggttattattgtattcctgccgaccttcatactttatatcttcctctctgagaagattattgccggcgtaacaggcggcggtgtcaaaggttaaggcggattgttcccgttcgcggaaccgcgtttttcgccggggccgggaaccgtgatcagagcgtgtttgaaaattcattcccgccatctgcacgccccgcttcgcggtatatttggcccgaattcgcttgccgtagcccactacgccgcgctcattcggactaaatctcccacaaagtgtgacgtacatctgacggaaagcaattttcaaacacgctctatggcaaattcaagtgaaaggatgtattaataatatggaaaaaaaaccggtattagtaattatggcagccggaatgggcagcagatacggcggtttgaagcaaatcgatccggtagaccgggagggagacctgataattgacttttcaatctacgatgcagttgaagccggatttgaaaaagtcgtgttcattataaagaaagcgatagagaaagatttcaaagagcatatcggccgccgcatggaaaagcacgttgaggttgagtatgtttaccaggagacggatgtgctgccggacggatatgaagtaccggagggccgggtaaaaccgtggggaacggggcacgcggtgctgtgctgcaaggatgtgattgacggcccctttgccgttatcaatgcagacgattattatggcaaaacggcattccgtgaaatttataaccagctggcttcccatggcgacgatgagaaatatcaatatactatggtaggctatgagctgtataattcaataacggaaaacggccatgtggccaggggcatctgcagtacggatgagaatcacaggctggtggatattcaggagagaaccagaattgaaaatcatggcggcagagcggagtataccgaggacgacggaaaaacctgggtatatcttccccatggaaccatcgtttccatgaatatgtggggatttacaaagagcattctgacggagctggaagccagatttgttccgttcctggaagcaaatcttcctgtgaatccggttaagtgcgaatattttctcccatttgtcgtagatgaactgttaaaagaaaacagggctgaggtaacggttttaaatactcccgaccgctggtacggcgtcacctacaaagaagacaaacaaatggtaatggatgccatccagggtatgaaagatgcaggaatttaccccgagaaactctgggaggacagatagatggttagcaagatactgaagacagaagaggccatagctaatatgagctatgaaggtgcggcggaggaatattaccgttacggccacggacatatcaacgacacattttacgtcagtacgatggcggaggacgggagacacgcctacattctgcagcggatgaatcgtgaagtttttaaggaccctgtatcactgatgaagaacatcaccggtgtcacaagctttctcaggagggagattgagaaggagggaggggatccgctgagggagaccctgaacctggtgccggctaagaacggcagggactattatgtggacagtgacggccaatattggcgctcctatttgttcatcggcaatgcaacctgttatgataaagtagtgaaaccggaagatttttatcagagcgcgaaagcatttggccgttttcagaggcagttatcccagtatccggcggatgaactatatgagacgattccgaatttccataatactccggtacgtctggcgacgctgaaaaaggcggtggaggaagatgtatgcggccgcgccgcttctgtccggaaagaaattgagtttgttctggaacgggccggggaggcaggagtggcgatggatatgctgaaagaaggcaggcttccgcttcgcgttacccataacgatacaaagcttaataatatcatgattgacgactcgacgggagaggcgctgtgtattattgatcttgatacgattatgcccgggctgtcaatctttgactttggtgattctatccgttttggagccaacactgcggccgaagatgaacaggacgtttcactggcaggattatcactgccgctgttcgatatttatacgaagggatatatggacggctgcaatgggagcctgacaaaagaagaggtgcagatgctcccaatgggagcaaagcttatgacgtatgaatgcggagtccgctttcttacggattatctccagggcgacgtatacttcaaaataagcagagagaagcaaaatcttgaacgctgccatacccagtttgcccttgtggccgacatggagaaaaagtgggatgagatgaacgcggttgtcgggaaatattccagccagtcagaaactgcactgacacgttcctaattgaaacaacagtcaccgccttcaatcaggatgtgaaagccggcggacagggcaaagctctgcccgccggctttcacatcctgattgaaggcggtgacctgtgaacagcaatactttaccaaagcttacgataaaaaagatggtaatactcggaaaatgtattataatagagatactcttataaaagttactgtctgtccggaaagggggagctgaatggaagagcagatttatagtccgggaatgcaggaaattctgaaagtgaatatgttcagcggattttcgatgacttatgcaggaaaaaagattgcattttcaagaagcagtaatatgaaatttattcagcttctgcttttgctgttccttcatgccgaccaggggatttccaaaaaagaattgatagatacgctctatggctggaatgccggggtaaatcccaacaagaatttgaataatgttatctacaggctgaaaaagcagcttgttttagccggactgccggaagaggaatatgttgttctcgaaagcggcatgtgccgctggagcagcagttttccggtagaaacagatgccgtccgttttaccgaatgcatcagcatggcaaaggaatcggcaggcgccgggcgcatcggttttttaagaacggcggaacggctgtatacgggtgaattgctgccggaattttctacggagctatgggtcattgagcggaatctgcagcttaagggaatgtatcagcaggctgtggtggagctgggggaatatctccgacaggccggcgagtatcaggaagagcttcggctttaccggaaagccggcaaattatatccctttgataaatggcagattcaggagattgactgtctgatgctgctgaaggagtataaagaggcatatgacgtctatcggaatacggccaaactctattgcgaggagctgggcgtgccgcccgggcctgagatggtaagccgtctgcgcaggatagagagtcagattaagaatccggtagggaattttgaagatttaaaagaaaacttcagggagcagaagaatacgggcgcctattactgcctgtatcccagctttcttgactcctgccagctgcttgcgagagtggcagagagaagcggaagatctattttcctgatgcttctgaacctgaccgagcggatggggaaggagataacggattcggagaagctggagacgcagatggagatcctgaaggaggtaatccggtcatcgttcagaagaggagatctgttcaccacctacagcaagagccagtatatgattattctggtcggaacagagaaagagaactgcaacaaagcatttaccaggtgtcttgacagatggaagcaaaccgaaggagcaaaaggggaactcagttattcggtagagtccctggtcaaaatgttgaatcccgaactgtcacaggagggggaaactccggactggaaatgagattccggtataaacaggtaaaaaagttataaaaacagtaaaaagaataaaaaaattaggagctgctattggcgaggtaattcgcgaggcagctcttttgttatgataaaaataatacgcttaagctgatagacgctgctctggatgattaaagaattaaaacggataaatgaggagaaaaaatggcgggaatgttcaggaaaataaaagaggatggcaggttaagacgaacgatggccgcatggcttggcatctgtatagtcgtgcagatggtgttcggcagccttggcgccgtccgtacgtatgccggcgacacgatttataaggtaatcacggtcagtgaaaaagagattataaaaggtgtgaagcgggcggccggcaaggaccatgagtatgttccgaatatagacagaaagaagcttccctatgcaaatgaagagctgaaagatgacgcaattgacaagattacgccttttttgatgggaacatccattattgaacagaaaaaggcgggcgataattgttctgtcattgtggcagtcagcggggaggagcttccggcatcgggcagtgaagccgaatacgcagcagaaaacgtaatatttatcggatttaatggaaataaggacagtgactgtgtatttacgctgcagatagtcgatgcgaacgatattgtaatacgctctatgacaattattacgtataaacaggacggcgcagcagccacgccgccggaggccagcggctcggaagcaacgccctccgaggatggcacggaaccggcaagcccgtccgccgccacatcttccacagcaaccggttctgagatacagggatacggctttgccgaagcaggggccagggaagagctggggaggatgaactgacggatttagtgcagaacggagatatttccactccgggagaggcagcctcacccggcagtccggatgacccgaaagatgcggcaggccccagaatgacggtaccggcaggcggattttgtatcgcatttgcggagagcggtacgaatgcgcacggaaaaatagcacaggttcaggcctttctggccgatggtgaggaaaaggtaatgtcaggcgcaatcggaacctttcatattgcggccgattacagtgtagttgacgaaaaactgccggaatacgcttatttcacggtgagattcaagatagaggatgataagggcaatgactacgggaatgtaaaaggcccggaaagtgagccgagcgccaggccggtttcgtccctgaacagtgaaaaacaaagggaatggaaggccatccacgaactgctgttggaatcttccgaatatgcggacgcggcgcagtgtaatgactggcagatgataacggcggaaacgaacacctatttttattccgccggggccggattagcggtattcggaatcaggaacggcggaaccgcaatcacggatcttccaatattctttacctttgataactatattacaccgattggttccgcaattacggctacaccgggaatcctgaacagggaggagcttaaagaggcatatgagagcagcgcaggccctgctcacagcggagatgctgccctgatcgaaggggaagcagtcaccatgagaagcaatgcccggtactggtggcatgatgtaaagctgtccaataccggcagtcttggcaatatggcggcaggaacaaatgtgggaaatgctgacggtgaaattatttacaaaatttcagcaggaaaagattacagaagcgacgtgggccgcctctatacaaaatcttattcagtcctcgacgttattgcatttgacgggtttgccctggatatttccggatatggattatctgttgatgcctcagtcaaaaaaggggaactgtatctgacaaaagatggccgtaatgtggcaaagctgattggactgaagcttccgggaggatatcattccggtgaagtaaaggtgacgccggtttaccaaaacaacgattcttcaacgaatatcataaccggttttgaagtgcgctacacggcagaaaacaaaactttggcaacagacgggccaaaagatatggcggacatcgtaagtgatgagatgaatgtctacctgggaatcggttcggttctcaaaaaggcggctggcatcattaaatatgacgggaatgcagcagtttccggccggaatccgtcggtgtcgtgcaaagcgtattttgacgcctattccatcatgtatgatgagacggcagacaacacggacctggaaaagaacgacggagaaacaaatcaccacagtgaagcagaaaataacctgactgcaaattccgcttatcctctgacgaaagaggcatatacagacagggactgcaaggttaaggcagagggggaaaataagatattcgaacccggccgggaagtccgttataaaatcagggtcaaaaataatggttatgcagaagaacggtttgacatcgtggactctcttcctgcgggtcttgacactgcgtcggttaagacattaaaggtgatggtggaaggaaaacagcttccggcagacgcttttacggatcttcctgccaatacggccgtttccccggccgtcaaagtatggggaaacattctgattccgtccggcggggaagcagttgtcatttttgaagccgcctttaaatcgaaaacagagttttccggtaataacatcaatacgacgcagaccaattcagccggatggtaccgcagttcagatgtgcagagagaaaaaaaccttggcagggatgatgcgacggtattcgtgaacctgaatactttacaagagagcgatgtcacattcaggaagactatcgtaaatgccggaacaggcggcagccagccggcagtgggcagcgacgtgacatataatctcatggcgggattaaccggaggcgtacacaattcccactggatcacggtaaaagacgaatggcccggctccgtaacgttaaaggaaatctccaatattccttcacaggcaattatcatcataaaagagaatgggacggagattaaacgctatgagaataagggaaacagcgcggcttcctggagcgcgttctcgcttgcagggaaatccggaattaccgtggaagcaagagtctatctcaaaccgggtgtgacggagaatattaaattaaaggggaggattgaggccgaaggcgagattaccaaccaggctcatgcaggaggcggagaaggagagggcttcgataagccgggtagcgcaactctttatgcaatcggagcatcgattgagaagaaagcttattttatcggagcatcggaaaagggcagtattacagagcagaacagcaggcgccatcctgtcgatcagagcgttacgttccgggccggagatgtggtatgttatgagatgacgcttaaaaatacgggtaatgacaggtttaaggctaatgtctcggacgacatatcaaacctgttcggagacggaatccgcccgatttatgcaaacgcggatttgggtgaaccgggctctgtatttatgaagaaaacgggagctaagggctggctcagtctgacgcccggccagagcgggacaaaggcattggatgagaacgtggaactggcaaagggggaaagtattgttttccgtatctatcttgagataccggagggagcatcggttctgttccccgaaaatacggtcagcgcttctctggcctatgataaggaaccggagcggaaatttgcgatcagggcgtccgcctcaattacaattaacgaggatgtccagaaggcctcgattgataaagaggtatacgcggtcgccagggagctgaaagaagaagggggccatgtctatctgaagggcgccaaatggaataatccggttcttggcagcggaacaggactggcggaagacgaaacgactctcactgtcggaaaaggagattatgttttctaccggatcaccattaataacgaaagtgatgaagaacctctccgcatctatgaaatcgaagactggctgcccgccggaatgcagtttgaacggttttatgaattcaacggtgcggaccggggaaagaagatacctggggcagtaggagacagcgatacgctggatctggggattaaagaaagaagcaataagttttccggtaaaaactggctgtattatgaagacgcggccgcaggtaaatggggaacggatgcagaggtggcggtgagccatggagcaaattttgcatcgatgaacagcggtaagacaacttaccgtgtccggctttacgatacggatgccataaagacaggtttgtcccccgttccatcggttaaaccgggcggaagtgtggtatacggaataattgcaaaagtcacgggagatcttgacggcattaagaaacttactaatactaccggtgtcattgttgaccagacggcgattacggatgaagcattcgacaggccggtttctgatttgagcggagcagtgggcggaaaatcttattccgatgacttatataagattataaccgcttccgctgatgtcgccgcggcgggaatttatactcccggtatcggaaagagcctggctcagtacaatgcttcgaataattggtatgattataaaccggacggtaaaaatgacaatttccttccgaacaatccgatgcgctggcaggtgaccctgtataatggaaccaacggccatatgactagagggccgattgaaaattatacaatcagggatgtgttcccggccggcctgacttacaacgaagccgatgcggacggaacctatattgtcacctcgggcgggaaaaagataccccttccggaaccggctgtcggacgcgaagagggaaagaatgtgacagcctcctggaagattgagaaacagtctgaaggatacctgataacgggtgcagacggccataccgtgaagacgaatgaaaacctggccattccggtaaaaggcaaaattacagtcagaataggttccagggctgacggcgacggaacggctaaatatggaacttatgtgaaccaggctgatttaataccggtccgggaatacagttatacggctgcctgtgaaggcacgctggtcaaagagggcaatcagcctgtctgtgtccgtgcggaggcatcggtcaatattttcttcggtgacggaaagacggaggcgtggaaagaaatcagaggctccttcaacggaacagaggggaccggcaccggcaccgacagctcccgcaattcaattattgccgatgccggaagcgaagttacgtatacgctcaacatcaggaatcaggtagaaaaggggattgaaaacctggtaatagtggatcgtcttccggcattgaaggataacggacttgtaaacaacatgcagcgaaattcaggtttcaaagtatcgtttcccgactcgcctgcaatcgaagtccggatcaggaaagcgtccggacaaatggtaagacttaaagacggagattataatgtcacgtttgcggactggaacacgaaattcggcaaaggctccgcattgcctgcaagatattgggaaccggacagcgcgtccgattgggagtcctccgccgcaggcagagacaccttccgcatcgaggtggaaaatgacgcgttaaaaggacttacgaacaatgatacggttatagtaaccttcagcgcattgcttccgaaggcatcagaactggatctgagcaatgagccggttgcgtggaacacattcggatacgcatacagggccgtcaactccacaaataagtcgactatcaccgtggagccggccaaagtaggcgttcggataccaacggcgtcccttgcggtaacgaaaaagattgaaagccggtttgaggaagataaggctcaggcatttaccttccgtctagagaaagaagacggggctaataccgggaaatgggtgagcgcaggcgggcagccctatcagcttatgccgggaaccggtgaaaccgcatcagacgggaaaactgcggagaatggggaatttaccctgaccaatggtcagactgcgaaatttacggttctggccggccggaattaccggattaccgagagagacggcgacggatattatgtgtctgtcagggaattcggcggcggcgccggagaggacaccctcttcgatcccgagaatcctccgtctgccgtattgaaaaatccctcggacggtaagagctattcctgtaccttcacaaatacaagaagcagctttttcctgccggaaacaggaggtgcgggaaccgaccatctccgcagaaagggagccggaatgatgcttgcgtcgctgttcgttctgatcggctgctttacaggaggtttgtcagggagaaggcgcagaaaagaagacgttaaacagagccggttcctgtgacaaggagagacggatgaagagaaaaggaattatcatattggccgtcctggtactgcttgccggagccggaatgtacttttatccggacatcagcaatatgtattaccaggcagcggcggcgtccgatatcaaggggtatcaaaagggggtccgggagctgagtaaaacgcaggaagaggaaatgcttgcaagggctgaggtatataacagccggttatccggcgcactttcgatggatcccttccggacgggaggcgctgctccttcggaagaagatgaggagtataatgccctgctgaatataaacggagtgatgggctatatagatattccaaagattgatgtttacctgccggtttatcacggcacatcggcggaggtattgaagaaaggggcgggccatttatatggttcagcccttcctacaggcgggagcgggacacacagcgtcatatcggcacacagggggctgccgtccgccaggctttttacggatttgggagagatggagaagggggacatattttatttccacatatttgaccggattatggcttatcagatagatcagatagaaacggttcttccgacacagctggaactgctcgatccggtgccgggcagggaatatatgacactgtttacctgcacgccgtatgggattaacagccaccgtcttctggtgcgtggggtaaggattccttatgaggtaacctccgatgggacttcgcaggaagcaatggccgccatacacatccggtgaaggggagaaaaggtagaggagaaaagagggaaacgcgatgaaacataaaggaattgcaaagaaggcaggcacatttctcatcactgcaatactcgcggcggcatttgcagtacagactgcggctgctgtgccggcggagagtgagaaggccgcgcttacaatacaggcatcctcagatgggacgggaatagcaggtgtagagtggtctgtctatcaggtggctgaaatgccgcaggacggagtatttatcctgacaggagactttgcggcttccggactggacattgacggcctgaatgattcaagtcaatcagccatgcagaaaaatgcggtaaaatcagctgcttttgtctctgagaataagataaaagcagctggcagcgaagtaaccgataaaaatgggagggcaaagataggcggtctcgaacggggcctgtaccttgtaagccagaccggtacacccgggacggacaggatagtgaagtcgatgccattttttgcagcactgcccatgatggtggacgaaggcggaaaaatggtcatgaaatatgaggtgacggctgctccgaaactggaagtggaacaaccgcctgaaacagaggcgccgtcaacggagacgccgtcaatagaagcgccgtcaacggaagcgccgtcaacggaagagacggataaaccctcgacggaagctccgcccacatcttctgcggaggaatcaaccggggaaaccggcagcgcttcacagccgtcgcagcctccatcaaccggctcaggcggttcatcgggcggccatgaccgggacaggggaaatactacggtaatcattgacagcaatacgccgctgtccagttttccgcaggcagaaccgcagctggaggagataggggatgaaccggtgccgctggcagcttttccctctcttccccaaatgggggatatgggagccggggcatatgcagcaggcatgctgatttcgattctgacaggctgcaccgcattaatccgccggaaaaagtataccggagggaaaaagtgatttatgaccgacaagacgaaacgacggctgtgtacggccgtatttacactcagcctcatctccatggcggtttttacagtaatgtatgtaaaaacacaaaaagagtaccgccacagtgaaagagatattgcggcggtaatggaaatacgcggagcaatatcgcccgctcttacaataaacgagaagagccggctggatgaggcctccctgagagcggcagaatatgagtcggcgcaggagcgccgggaaggctgcaggcttctgaaggagatcaatcaggatgtggcggcatggatcacgattgcgggaacacccattgattacccggtaatgcaaaccccggacagtccggattattactacaggaggggatttgacggcagatattccgcatatgggatgatttatatggatgcggcctgccggctccgggaggatgaagcgctttacgaagcggaggcagaggaagggaaggcaagtcccaactgcgtcatttacggacatcatatgaaaaacggaaccatgtttgcctcactggaaaaatacggttctgaggaatattataaggaacatccggaaatttgtctggatacacccgattcgtcatcggtatatgagatagtgggagttgtcagacttccggccgagaagctgagcagcggatttgcggcagtgctggcagccagaacacgggaagaatacgaaagctttgtacagtacataaaaaaacatgctgcctatgatacgggaattacggccgaatggcctcggcagcttattacactgaccacctgtgaatacacactaaaagacggcagactgctggtcgtggcacgtaaaaaacggtgagaaatccgcgttgcggacttctcaccgttttttacgtgattccggctttacattaagcgcatctgcatctgctccggatcactgctgtagctgatacaggtgtcacgggatattttgccttcccgcataagccgcagcaggctgttattcatgctgatcatgccctcggccatactggtggcgattacattatctatctgatgaatcttgccctcccgaaccattgtgcggattgcatcattcaggaacatgatctcaaaggcgggcaccatgcttccggtgacggtagggacgagctgctgggagatgacggcctggagaaccatagccagctggacgcgtatctgctgctgcccgtcgggagggaatacgtcgatgatacggtcaatcgaattggcggacccgatggtatgcagggttgaaatcaccaaatggcctgtttccgcggcggtcatcgcggttttaatcgtatcgaaatccctcatctcgccgagcaggatgacatcgggagcctgccggagggaagccaccagaccatttacataactgtccgtatccagtccaatctcacgctgggtgacaacggaacggttatgccggtgcagatattcaatcggatcctccaaagtaataatgtggctgtttctcgtcctgtttatttcatcgataatacatgccagagtggtggattttccgctgcctgcggctccggtgacaaggacaagcccttttttcaggtttgccgtccggatgacttccggagggatgttcatatcttccggtctgggtatctcaaagtgaacaacacggatgacggcggccagggagcctctctgtttcatgatactcacgcggaatctggcgactcctttgatagaacaggaaagatcgtcatccccgtaggtatgcagcttatccatacttctgtggttgctgagctcataaagcgcagtgatcagagcctccgaatcggcgggcatcagtttattatcgtcgactggaataatcttaccatttattttataggagagaggaaggccggggattataaaaatgtctgatgcatttttctccacggcgtcagtcaaaaacttaagcatggtatatctcctttcaaaccttgttcttcattattcatcaggggcgatccatacgggaaggctgtcgtctatcgcataatcttcccgattgtagacatagcttgccagaacctccctgctactgccgtccagttcaattcggagagcctggccggcattcatcggtatttcacagtagagcctgcctgcctcatcaactcctgactccgttccttcaggcatcagtaaagctgcatcagaaagggcctcctccatgcttttgttaccgtcaagagccgagacggcagcctggatgaactcctggcccatggcatcggcctggtagtaggcggttaccgaatctgcacggcgtctggccagtacaagggccgaattcccatcgctcagactcaggagagagaaaacggcgaggcagaggatgataaaaataaggataatggaggctgtgcctatattgattctgtttttcatggaagcctcctttcagcggccagacttcgggcgccgctcaaggtatagatagtttccattccttttcctctgatatcgctgatctccacagatacgtgaagcagtccttctgccgcgtatgaattaattttcataaaataggcagcttccggatcggccggttcacatatcttccaatatctgtcaaaaccggaatgtgtctcactggggcagacgcttcgtcgtattcggcaaaagcagtttcaattgcgttctcggcggcgagaacggcgtggtttaagttttccgcattctggctgagccggtcggcctttgcaaacgcaagtacgaaaatacaggcagccactgcgaaaaaaccacatacccacagcatttccatcagaaaagcataagatgtccgttttttattcattcctgcggcctcctttcgaactgctgcgaagaaagaggctggcagttctggggaaggagtttcctccagggtaatctcaagcatcgctccgttcttcttatcggcaatggagaaggaaatgggctcacagtccataataggaaggccgtcttctacggtgaggccgcttccctgctcggaaaacagctccagcagtgagccgtcttttgtgtaaacccaggtttcatacaggatgccgtcgtaatcggaggccagcaccaggatgctttgcccttcaaccgtccggacactgatgctgccggtccgatcggactggcgtactttgttcgtgatatagctcaatgcggtgtctgagtaaaaagctgcgtcgtttctggcgcggatattgccgtatacgcggctgccaatcagaatagtgaagacggagcatagaataaatacaagaaacagcagcatggaaaagataaaatccatgccttccgagggacgcgatacagtctttttcatagctgccctccctgctttgcctgcccggtcacgggcagaaccgtgatatctggcataatgttggcggcccagccgtcgtagaacacattatagcgttcgcggtcaattacaatgccgtaattatcttccagatattcaacgctgggcggataacggccttcaatggaatagcactggacgctggcccggcggatggcatccgtcagcatatttaactgatcctcttttgtcctgctctgcatggctcccatggaataaaggaagagatacaggacaataatgaggaggagaaatgaaaacagatatccgggcagggaactcctgtgttttggaatttcaatatgtaacatagatatacactccttatcgttacagttgcgccttcaatgtcatttagttaacactatgaagatttagttaagcaggtgaggacgccgccggtacggccagcggacggggtggtggggtgtgtatattagtctttcgtcccgggggagattgtcgtggtttggggctgcgggcgaagataaagtctgcggagcacgctcccgctctgtgaaatgcatcgcgctgctaagctcggcaggacctcgctaatcagcgatggatttcaacggcatccgcagactttatcttcccctccgccccaaggtcaagtattcgccgggacgaaagactctgccaagtgtatcggccccgtccactggcctgcggccactgaatgtctcacgcgttaagtgcggggcggaccttgtcgcggccactaagagcttccgtgaacgggaaattcgatatgccttcaatgccatttttatataattgcggaaagtttgatttcagtttgccagaaacacgtagtggccgcgacagggccctccccatttaaggttggagacaatcagcgcccggaacggaccatgtccggtgtcgaaaacctccgcttgagtgttccgtccccggtgaaaaactgacccggggaagtaggcggaatcaattgcggaggggacatgggagtccgccggtgcttagcgaggtcttttcgagcttagcactccgatgcgcactccaaagagtgcaaacggtccccgcagcaattcattccgcctacttccccctccacaaccaacttcccacggggacggaagactcagccatcccctcaccacaccggacatggtccgttccggacgcgtcctcctaacctccgttaaatttccaatttattgcattgttaatcaaatgacattggttcagccttcggctaaaccgtaacaaatgatgcacagaaacggcaaaaaacgtcgtttcgcgccgcacaactcgggattttcgcaagaaacagcgaaaacacctcgcgggctacatcatggctgaactgttactccttatccgatggaggacagaacacctgccagaggcagcatcacggcgagaaggaccaggccgaccgcaacggccagaaccgatacaattgtaggttccaggcgcgctatcatagagtcaatggcctcggaggacttttgctcgtaatctattgcaagacggtccatgatgcggtccagctgtccggcgcggctgcccacacggatcagctgcagctcgaatccggaaaacagtccggcttctttgactgaatcgtagaagcctttaccctgagagacggcttctttggcatttttgatttgttcttcaacagtccggttatccaccagagtttgcgccaggccgaatgcatccggcagattgacgccgcattggagggacatggccatcacattgcagaatctccggtcagcggcagcgcgggcgatgacagaacgcgctttgattttctccagaagggagagtgccagggtggattggactcctttttttccgaaaagccataaaatcagggctgaggcgatgagaatcgctgcaagaaccagggcggctccgcttaatatgcccccaggcggatagcggcggcagcggctggaggaatggatgttccaagctgctcgtaaacgccggaaaataccggcataaccctggtaaagaggacgaacaggataataatcagcataagaatcatcatcgccgggtaggtaacggcttttctgaggttctcagcaagataatattctttttcatagtaaacggccagccgttccattgtggtatccagcaggccggtccgttcccccagcatggacatgttgacgacgtatgccggaaaacagccggcttcccggactgcctgatgaaacggcagtcccatgcggactttgtcggacagttccgtaaggatttctttttcccgttgtacggggaatcttcagccataactttcagtccctcgtagagaggaattgcagattccagaagaatcgagatctgcatgcagaacccggacagtgccaggcctgtaaacggtgatgatgcgccgcggctcatagtaatacctcctgtttatcaataacagaatttctgtctgtaatttgccggattgctgacatagttcaggacttcagcgcttttctttccgctggatacaaaagtggggtccattaatttccagtcagttccgtcgaaatagatgatattatcaacccagccctgcccctgaatatatacgctcacccatgcatggtatacattgcctgcataaccgatgacaagcttggtcggaatgccctgtgcgcggagcatcgaggtcataactgccgcgtagtcaaaacagattccttttttctgggccagcgttgcatccacattgggaagataaccggactgtacggtcgcagccttttggttgtcgtatgtgatgttgtcaacggcgtaattgtaaatggcttccacctttttcagcggatcggtcataccggacgtgatggtatcgctgacagtgacaacattagaatcggcgttaaagttacaaaactggttgggatataaaaatggtgttgtatcgcttgcaatattcacctgtatcgtctggctcacggcctgtgcgtaggaagtgccggatacattctcgaataccttaaccgtataacttccgcttccctcggtcagcggaaaggtcacataatcgccggaagcggttatatcataggtgtattcggtatccttctggatccggagttttaccttgggattagaaccggtgtatttgaccatcacatatccgtcggatgtgtgggaggcgtcgatcacggcttttgcgctggtgtagaccacggtgccgtcggccttcggtgtatatatagttgacgcctgtgcctgggaaacccctcccggcgccagagccagaaacagagccgaggccatcaacaccgggtataatctgaattttattcgattcataatgtatgctccttctcaaaaaaaattatacattaaataatatggctttttaccgattattttaattcttttattatacaaaaaactacagaaacatacaagctgttagattttaaattggggatttaactgaggttgggaggacgcgtccggaacggaccatgtccggtgtggtgagggggatggctgagtcttccgtccccgtgggaagttggttgtgaagggggaatccggccggaatgaattgctgcggggaccgtttgcactctttggagtgcgcagcagtgctaagctcgtaaaggacctcgctaagcaccggcggactcccatgtcccctccgcaattgattccgcctacttccccgggtcagtttttcaccggggacggaacactcaggcggaggttttcgacaccggacatggtccgttccgggcgctgattgtctccaaccttaaatggggagggccctgtcgcggccactacgtgtttctggcaaactgaaatcaaactttccgcaattatataaaaatggcattgaaggcatatcgaatttcccgttcacggaagctcttagtggccgcgacaaggtccgccccgcacttaacgcgtgagacattcagcggccgcaggccagtggacggggccgatacacttggcggagtctttcgtcccggcgaatacttgaccttggggcggaggggaagataaagtctgcggatgccgttgaaatccatcgctgattagcgaggtcctgccgagcttagcagcgcgatgcatttcacagagcgggagcgtgctccgcagactttatcttcgcccgcagccccaaaccacaacaatcctccccgggacgaaagactcatatccccaccccaccaccccgtccgctggccgtaccggcagcgtcctcacctgcttaactaaatcacctgctttagtaacaaagacctacctgaacagtaacgcggtggtaataataacaaattaattgcattcggcataaatattgatataatggaaatacaatgttctaaacaaccggtgcggagaacgccggaaaagggggagattgccgcttatggcggcaaggaaaggaaggattatgaataaagtttttaaaagtctgcctgtcagactgctgttaggtgtcgtcatcggtattctggcaggactggtggcgaatgaagggctgatgcatgttgttgtgactctgaactacattatgggtcaggtgatttccttctgtgtaccgctgataattatcggatttattgctccatcgattacgaaactggggaagaatgcctccagaatgcttggaattgcccttgtactggcatacacatcatcactgggagccgctctgttctcaatggcggcaggttatgcgctgattcccggcatgtctatcaatccggccgtggaaggcctgaaagaattgccggaagttgtattccagctctccattccgcctgttatgggagttatgagcgccctggtattctcagtaatgattggcctggccgccacatggacgaaggcagttaccgttacgaagctgctggatgaattccagaaaattgtgcttgatgtcgttaagaaaatcattattccgatactgccgatttatattgcattcacattctgttccctggcatacgagggctccattacgaagcagttccctgtctttgtcaaggtaatcattattgttatggccggacactatctctggatgacgctcctctattgtctgggcggcgcatattcaggtaaaaatccggtgaatgtcgtgaaaaattacgggccggcctatattacggccgtcggcacgatgtcttcagccgccactctggcagtggcactggagtgcgcgagaaaatcggaacccactctcagggacgatatggtagatttcggcattccgctgtttgccaatattcatctgtgcggatcggtgcttaccgaagtattcttcgtcatgacggtttcaaaggtactttacggcactctgccggaactttcaaccatgattttattctgcgtactgctaggggtttttgcggtaggagcgccgggggttccgggaggaacggttatggcctctctgggtctgattacgggagtccttggattcgacgctacgggaaccgccctgatgctcaccatctttgcgcttcaggacagctttggaacagcctgcaacgtgaccggagacggagcgctcacgatgatcctgaccggatatgtagagcgccataagattgagaaacagaaaatcagcgtagatttgtaaagataaaaatcaaattatttcattcaggaaagatcaggccggctgcgattatccggcctggtctttctttttccccttccatattcccggccaaaatgatatactgaaaacagattgtacgctgtttttacaggtctgcggacgggaacaccccacggaatacagcctgtgaacggcagcacggcagcttcatgcaaattaacgatagaggagagacatgcaatgaaaaaattaatttcctggaacgtaaacggcctgcgcgcctgcgtgggaaaaggttttttagatatttttaaagagctggatgccgatattttctgcattcaggagagcaagctgcagggaggccagattgatttggagctggatggatattaccagtactggagctatgccgagaagaaaggatattcagggactgcgctttttacaaaagaagaaccgctgtccgtgacctatggtctgggaattgaagcccatgatcacgaggggcgtgtcatcacggctgaatttccggattattatgttatcacatgctacacgccaaactctcaggacgggctggcaagactgccttaccggatgcagtgggaggatgattttctctcctatctgaaaaaactggaggagcataaacctgtgattttctgcggggatctgaatgtggcccaccgggaaattgatttaaagaatccaaagagcaacaggaagaatgccggatttaccgacgaggagcgggggaaattcacgcagcttctggagtccggatttattgatacgtacagacatttttatccggatcaggaaggaatatactcctggtggtcataccggttcaaggcccgcgaaaagaatgcaggatggcgcattgattatttctgtgtgtcaaaagccctggaagacagactggagagcgccatgatccacaccgaaatcatgggttcggatcattgtcctgtggagctggtgatacggtaggatttaccgtttcccggcgggagcgcggacgcagcacgcgggggttaggattcaaagccctgctgaaaagcgcagttgcgcgaacaataaacacggagaactacggaaaattaaacggacaggaagcagatgattatgaatttacttactatagaacatttgaccaaatcgtatacggagcgtcttcttttcgatgacacatcattttctattaatgagggggataaaatcggcctgattggaatcaacggtacggggaaatccaccctccttaagattgcagcagggctggaagaaccggatctgggaaccgtggtccggggaagaaacctgtatatcagatatctgccccagaatcccgtatttgaacctcagcttaccgtactggagtgtgtaataaaagagaatgaaggccatgaacacgtctgggatctggaaggacaggccaaaaacatgctgacccggctgggggtgtcggagtacgacgctgtgatatccacgctgtccggaggtcagaagaagagggttgcactggccagcgttctcttatctgcggccgatctcctggtgctggatgagcctaccaaccatcttgacagcagcatggccgactggctggaggactacctcaaaaaattcagaggcgctctccttatgattacccatgaccggtattttctggactctgtgtcaaaccgtatcgtggagctggataagggaaaactatacagctatcaggcagggtacggcggctatctggaaatgaaggaagaacgtatggcgatggaacaggcctccgagcgtaaacgccggagcatcctgagaaccgagctggaatggatccgccgcggagccagggccagatcgacgaaacagaaaggccgtattcagcgctttgaagaactgagcgcacgtaaaggaccggaggaagacggggatgtggagatgaattctcttacaagccgtcttggaagaactacggtggaagtctcgcatttaaataagagttacggagataaagtcctgctccgtgatttcacatatatttttctgaagaatgacagaatcggcattatcgggccgaacggaagcgggaaatccacactgatgaagatgattgccggcctggttcagcctgattcggggagacggttataggacagaccgtcaggatgggatatttttctcaggataatgaagagatggacgacagccttaaggtgatcgactatatcaaaaatgtagcagagtatgtgaagacgccggacggaatggtatcggcttcccagatgctggagcagtttctctttccttccagtatgcagtatacattaatcggtaaactttcgggaggggaaaaaagaagactctgcctgcttcatatactgatgggggcgcccaacgtcctgcttctggatgagccgaccaatgatctggacatcaggacgcttacgattctggaagattacctggatcattttcaggggatcgtcattgcggtatcccatgaccggtattttctcgacagggtggtgcgccggatttttgcatttgaaggcgatggcgccgtaaaacagtatgaaggcggttacaccgattatcaggctgctctcgaagagagagggcaggggcaggaggagagtaccgccgccaaagcgggggcggaagaccagagccagcctaaccgcaaaaactggaaggaagggcagccgcgggagacgaagctgaaattcacgtataaagagcagcgggaatgggagacgattgaggagacaatcgccgctctggaggaggaggtggctgagctggagggtgagattcttcaggctgccagtgattacagccgtctgaaccggctgatgcaggagaaagaggaaaaagaagcacagctggaagaaaagatggaacgctggatgtacttaaatgagctggctgaacagattggggcacaataattgttacagcccgggtttaacggcgtgggagctgtaaccaataacttcggcaagatgactgccggatgggagatggacaagtgaagacaggcgaaatggaaaaaatacagaacggccacagaaattttcctttaggcattacaaagacagagaaaggaatccatatctgcaccgtggctcccggcgaaagctgcagcctggtggtttacagggatgggaaaataatagagaaaataccgttttctccggaggagaaggtgggagatgtatggtccatggaactttgcggcgatggattttcgggactggaatactgcctggagacggagagcggggaacagcccgatatttatgggagagaattccggggacgcgaacaatgggggatttatcttccgtcaaaagaccggtaagaagctgttttgtcctggaggactttgactgggaagacgacagaccgttaaaatacgctttcggggagatggtgatctacaggctgcatccccgcggatttacaaagcatgcatcctcacacacttccgacaggggaacgtttaaggcaatcacggaaaaaattccctatatgaaagagctgggcattacgacagttgaactgcttcctccaaatgagttttgtgaagtaatgatgcccgatcagtcggacggcaatccttaccgcagccaggagcctacgggacggctgaattactggggatacggggaaggtttttactttgcccccaaagcgtcgtattcgtcgggagggcataagagaccggcagcggaattttgcagcctggtcaaggagcttcaccaaaacgggctggagctgattgtcgaactgtattttaccgggaaagaaaacccgtctctgattttggaggcggtccgcttctgggttatgcagtaccatgtggatggagtgcatctatccggatatgcaccggccgggctgctggtgcgtgatccatggctgtccgagacaaaactttttgcaacatcgtgggagaatgcggagaatggcagggtgcgccatctgggagagtacaatgacggttttctggttgatatgcgcagtgtgctgaagggggacgaggatcagattaataaattgatcttcagaaaccgaagaaatcccgccggcttcggcgttataaattatatggcgaatacgaatggatttaccatgatggacatggtgtcctatgagatgaaacataacgaagccaatggcgaaaataaccgtgacggaacggattataatcatacctggaactgtggcgtggaaggtccgacacgaaaaaagaaaatagtacagatgcgcagaaaacagttgagaaacgcctttttactgctgtttctaagtcagggaacacccctgcttcaggcgggggatgagtttggcagcacgaaaaacgggaataataattcctattgccaggataatgagatctcctggattaattggaatttgcttgagacgaaccgggatatttttgagttcgtcaagtacgtcattgcttttagaaaagagcattctgtttttcatatgggaacggagccgaagaatacggattacctggtctgcggtcatccggatgtatcatatcacggagtgaaaacctggtgtccggaatttgagaatttccgccgccagcttggaatcatgtattgtggggaatatggggaaaaaacgggcggcgcgcccgatgattacttttacacggcatacaatatgcattgggaaccacatgaatttgcccttcccaaacttccgaagggcatgatgtggcatctggcctttaatacggatgacaatgagaataatggtatatacagacacggagaggaaccggttctaaaaaaccagaaacagtttatggttccgccgagatgtgttgttgtatttatcgggctcagaagtatcggccatgatgcaaaaattcaggagtgacaatgaaaaacagacaaaaacggttacttaataacagaatagtggctttgatgctgagtgcggccctggttgctccggtactgactgcattttatggaggaagcgcccaaagcgtcattgtggaggcatcggcgcacggtaaggagcatcggaaaaccggtgtgaatatttattcgctgggtccgggctatcagtcgctgccgtattccgatacgtatggggattatcagtgggctttgcttaacagcggagtgttcaagctggttccgagtacgaaaactccactggagagcacttttcagggatggcttggaggccagaatgccggacagaacaggccggggcctgccagggagagtgaagggacaactctggcggtagccgggattgatattaatattatacctgcctggaagaaatacgatgcgaaagaaggaaaacgccaggtaatcgtagccgtaattgatacgggaattgattacagccatcctgatttggcagatgctgtctggatgaatgaagatgagattccgggtgacggaatcgacaatgacggaaacggatatgtggatgatgtttacggatggaatttctattcgaataataaccaggtgtttaccggtccggatgatgatcatggaacccactctgccgggacaatcgccgcgtcgagaaatgggagcggaataataggaatctgtgacccgtcctatgtcaaagtgatgagtgtcaaggcattgggaacacctgccggtatcggcacggcggataatgtggcaaaggcaatccgctatgcgcaggacaatggggccgtgatctgtaatctgagctttggaaccaataaatacagtgaggaattatatcagacgatgaagaattccggcatgctgtttatcgtagcggcgggaaacggcgacagttccggcaggggatataatatagacagtctccctgtttatcctgccagctttgatttggataacgtgatttcggtagccaatttaaggttcgacggacagatagatccttcctccaatttcggtgcgaagagcgtggatctggcggcgcccggcagctatatcctgagtacggtttccggaaataaatacagctatatgagcggcacctccatggcggcgccgatggtgaccggtgcggccgctatgctgtattcttatgattccggtcttgcggtgacggaaattaagggcagaatccttaattcggtccgccgtctggacagcttgtcaggcaaaacgtcaaccggaggcatgctggatgtttcggcagcgctgaatctttccgggaataattaagaataaaatgagagaacaggtatatgaagcgattatcggaggcggaatttcgaaataagattacatggatgacttttatcctgagctgcctggttgtaatgattcacagctataacgcagacttattcataaatggagagggaaccggagtgtttgcagaaagcgtaaagcaggtgcaggctctggtttctcttgctgtgccttccattgccgtgccgggattttttatcatttcatcctatctgttcttccgggatgtgtcatggggcgagattccggataagatgacgcgcagggtcaggagcgtgctgataccatacatcgtgtggaacacactttactatttcctgtttatcgtcgtgtccaggattcccgtcctgtcttccgtggcagggaagggaatggttgttttttctctggaaaatttggcggatgctattattaattatacttataaccctgtactttggtatatgcagcagcttatacttctgatagcgctcgcaccggccgtatatgcggtgatgtcgaatctgtgggccgggggagcggcaatcgccgttttattgtattttctcggcaaagccacggtgatacccgttttgaatctggacgcgctgctttatttctcatcgggggcctatctggctctccatggaaggcggctggcggaaaaaagagacggggataaagctgtatcgcggctgcttaagtgggccgtggttctggcctgtgtcctgctctgcatcatgatgttcaggacgacacaccgttacgccaattttctgacggcagtgctttacggactgctggctccggttacgatctggattgccctgccctcaggccggcttccggctccggctccctggatgaaggagagcttcttcctgtatgcgttccattttctcattgtcaggacgattaacaaggcggcttcccttgttctgccccatacggcgggggtggcgctgatcctgtattttgcagtcgccgccgctgcggttcttctttcctggggaacctcagaattccttaaaagaaaaataccgccgctctggaagctcctgagcggcggccgttaaaaaatgcttagtaaatgcttagtgcttagcgttcgccggattcccaccggccggaagcgccgcagggcagcaccagcccgctttccgtaacaggcaggcctaactcgtctgagcgtacgctccccttatattttggcagcagctctgtggacagcatataagtcagcacggagggagccagtcccgtagtataagagttaataaggtaaaaaagcggttcctccgataaaagctgtgcgcacagtttgacaaaggggtgaatcgcttcttcgatcttccatatttcgccttttggtcctcttccgtaggaggggggatccatgatgataccgtcgtaatggttgccgcggcgtatttccctctctgcaaatttgacgcagtcgtccacaatccagcgaatcggggcatccccgaggccggatgagcgggcgttttcttttgcccagtttaccatacccttggaggcgtcaacatgcgtgacagcggctcctgctttcgcggcggccagcgtggcacctcccgtgtaggcaaagaggtttaagacctttacaggccttccggctttccgtatcttatttccaaaccagtcccagttggcggcctgctccgggaaaaggccggtgtgtttgaagctgaatggcttcaggttaaaagtgaggcctttatagtcgattgtccactgttccggcagatcgaagaattcccattcgcctccgcccttggagcttctgtgataatggccgttcatcctcttccagcctctgtgtttcttggggtatcccagattacctggggatcggggcggaccagcaggtagtctccccagcgttccagcttctccccctgggagcagtctattacttcgtaatcgttccagccgtcggcaatccacataatataatctatcctttctgaggggcagaagtgtccggtattttctgatagccggattctgccttttattgatggcggtgacctgtacgcggagcgtgcaggttatcgttaattggcggtaaaggtcagcagagcctgtctttaccgttaaaaatgcatgatgtatgcgggatatccgcagaatatcccaacttcttatctattatatatggtcagaataggggtgtcaaatggaaccgggggtgaaatggagatttagttaagcaggtgaggacgccgccggtacggccagcggacggggtggtggggtgtgtatatgagtctttcgtcccgggggtttggcatcgctggatggagaaggagatactgtggttttgttttcgcagggcggagccggagagaatgatatccggctggactgcttcttcgagggatagctctaagacagaggaaggcaaagccccccggggttacggacaaattcgctccgaactccgaatgagttcgaagctcaagttgtcccggattttgcccttgtagggctaaaatccgcccggcgcgctttgtctccctctgcctaagagctatcatctctcgggcgaacgtccttccggatatcattctctccttctccgccggaagatgtcggcagtatctccttctcccggaaggttttcgccggaacgaaagactccgccgggtgtatcggccccgtccgctggcctgcggccgctgattgtctcacgcgttaagtgcgggggcggaccttgtcgaggccactcagtgctaccgtgtgtgggaaatacgatatgccttcaataccccttttataaaaaatgtggaggatttgatatcggcctgccggaaacacgtagtggccgcgacagggtcctccccatttaaggttggagacaatcagcgcccggaacggaccatgtccagtaccacgaaaacctccgcctgagtcttccgtccccggcaaaaacctgaacgggggaagtaggcggaatcaattctggaggggatatggaagcccatccgtgcttaatgaggtttctcacgaatttagcacggctatgcgcttcgaaaagtgcaaacggtccccgtaagaattcattccggccggattcccctccacaaccaacttcccacggggacggaagattcagtcagtcccctcaccacaccggacatggtccgtcccggacgcgtcctccaaacctcggttaaatctccaaaagaagctccccagtctaaactgtctgaactattgcaagatagtattgaactgttgcaattctttctgatacaatagaaaagataagggtgataaatcaccctgtcaaataatacaatcggaggaaaaagaatggaaccagtcgaagtaagggatatgctgtatatcctgggcgtatgtgaagagcgaagcttttcccgggcagcggaaaagtattatatttcgcagccggcgctcagcaaaattgtaaaacgggtagaggggaatcttggcgcacaaatctttgaccggagttcggttcctctgaaggtgacgcccgaaggggaagtatttgtcgactacttcaggaagatgcaggagattcatctggagatagaggggtattgcgatgaactgcgccgccacagaaaatgcgatctgaatatcggagcgccatcttttttctgcacatatgtgcttcctcccctgatcaatgcttttaaaatggaatatcctggtattgcaatcaagatgatagaaagcaatgacagtgatttatgcaaatttctcaaggccggaatggtggatctgggattttccgtagagccaaccatgccttctaactttaaatcctttgtactccaaaaagagaatatcatcttagcggttcccagcagcctggcgattaaccgggagctcctatcctatgccattggatatgaagacatatgcagcggccgttttctgatgccggaaatcccgggggtacagatggaatggtttgcaaaagagaatttcctgtttctgaaaagaggcaacgatatgcaccgcagggggcttaaaatctgccgggacgcaggttttgaaccgaatatcgtcatggaaatggatcagctcctcagcgcctgctatcttgccgggccggttcgggaattacctttatccgagccagtattccctattacataggcccgtcggaggaattggtattctataaaattaaccatccggatacaacccgcaacctgagcgtttattacagagatgaggagtgtactgcattacagaagctgtttattgaacatttaaaaaatacaccgatgccgggatgagtctattccatttctgacatgaaagtatatccccctgtctattggacaatatatcgccccaatgctatgatcggattaaggtacaaagtgataccaaataagtattggcccggcgtgttatcgtatacaaagcggcggactaagcgaacaggagggtaatttatgacggtagcagaaaaattttctaatcttggaattgacaatgctccaggacaggaaagtcttcagaagtcaacggtgcttgaatttagaggggagaagattcctggagctgcagttgatttttcacacggtgatgtcgatgcacatgagccgattcccggcagctttgaagtgtttgcaaaaggtgtcgaagagggcggttcccaggcctatacgccctatcgggggaaaaaaagcatattggagcatgtggcagcccatttatcagcctttacagggattcagattaatccggatgagaatctgattttgacacctggaacacagggggctttatttcttgcggcgggcagcaatattctgccgggcgacaaggtggctattgtggagccggattattttgcaaaccgtaagatggtggaattcttccatggtgtactcgttcccatccctatgcaatacgaaaacaggatcggcagcgcaggaattgatttggaaatactggaaaaggcatttattgacggagtaaagctgtttattttctccaatcccaataatccggtgggatgtatttattcctatgaagaaatctgcggaattgcttcgctggcaaagaagtatgatgtcacattgatagtggatgagctttattcgcgtcagatttatccggggatgacatatacacacctttgcgctcagaaagagattccggataatctggttaccattatggggccgtcgaagacggaatcgctcagcggataccggctgggggcggcattcggaaatgcagaaataattgaacgcatggaaaagctccaggctattatgtcccttaggtgcagcggatataatcaggccgtatttaccacctggtttaatgaaccggaaggctggatggcggcccggacggcaaagcataaggaaatacatgatgcaattatggaaaaattggcaggcgtaccgggggtttatgccagaccggcagaaggcggaagctatttatttatcaggattcctgaactggatatatcacttcatcattttatcaggattgtccgagagatggctgatgtgacagtgactcccggcacggaattcgatccgaaatgtatctggcagtttcgtattaatttttcgcaggataaagacaaggcggttgccggaatagaacggctgcttcagattatggaacggtaccgtaagcacggataatggaggagcaaggaaaatgaaaattgcatttttaggcggtggaaaaataggcagagccatgattgagcatgttgtgaaaaataaaaatggcgagattgttttcatctacgatccttttttgaatgaagctgaaatttttggtattaaagtggtgaatgaaattacagaaagtatatttaagggacttgatctggtagtggaatgtgcgcaggcatcggtgttatctgatcatctcgcaaaaatcctgccttgctgcagtatcatgccgttttctatgacagccttccgtgacgatggtttaagagaacaggcaaaggaactttgtgaaaggtatggtacgaatgtattcctgccgcatggggcaattcttgggttggatggtatttttgacggccgtgatgtcctgaaggaagtaagtgttgagacaatcaagaatccaaagagccttggacgcgatgataaggaagtaaccgttctattcgaaggaactaccaggaaggcaactgaattatttccgaggaatgtcaatgtacatgccgctgttgcacttgccggaattggctttgaccgcacccggtctaagataacggccgatccatcggttgacaccaatactcatataattcatctggccggggacgggattgattttgaaatccgtgtttccagtttttcagagggggagtttccggaaaatatgttcctctttctgcatgcgggagcctggatcgggttttgggaggttccggatatcaatttgtataactatagaggaatatcaggaggcaataaattatgaaagcggcagatattttgtttgagatatgcggaaattgtaaaaaagatgaaaatatattgattattaccgaccaaaccagttatgaaattgcaaaacgtgtgtatctggaaacaggtgattatccaaaccgtacactgcttatgacagaggaaacgggtatgcatggggctgatccgagtcccctggcatgcgaggccatgaaacgggctgatataatatatggctgtaccactttctctctgttccattcaccagcccgccgggaggcggcagcaaaaggagtccggtttgtcaatatggtggactatcgtatggatatgctggatactggaggattgtttagtgatttttattcattgggatcgatttgccaaaagattgcagaaaatctggaaggtaaagacagatgccatattacaacggaattaggaaccgattttatttgttctatcaaaggacgcaaaccgaatccgcaaattggacgcagccctggaaaagggatggtatcttccccacctgatgtggaatgcgctacctgcgcggtagagggtaccgcaaatggagtgatttatatagacggaagcattccctttccaggccttggtttgattcataatccggttaaactgacgattaaagaaagccgtataataaatatagagggaggagaggaagcggaaaaacttaaaaatattttgaatagtgtagatgatcccaatgcctacattgttggtgagattggcttaggattaaatccaaattgtaaattgagtggttccatgttagaagacgaggggtgtggtggcacaattcatctggcatgtggtgataatgtaagctttggggacgcacatcctgccggttacatttggatatgatatttaaatcgccaacaatgatagtggataatgttaagattcttgatcagggagaagtggtctgctgttaaggcaaaggagggggagtttaatttatggggagagaacaaaaaaaacttagtgtagccaaccagatgctaattgcaatggcggctggtattattgtaggcattattatgatgctgctgaaatcttttttgataaatggcggaaatgaaaaaatctggaacatgattgactggttactgtttgcagatattacagcacctggtaatgcaacatccattggcttgttttatataattaaaactttattcattgcgggacttcaatttggtattgttccattggtacttacctcgatttcgctctcattatgttcgctgacggatacggcaaagcttggcagaattgcaggtaaatgtttggccggttttcttggcttttatgtatttggagcattgattgctgttgcagcttcaatagttgccatcaagaccggtttcttcagtcaaacaattgcagtgagtggtacagcagaagcagttgtggaatattccgttgcgaatccattggcaattttgattaaagccgtacctgctaatttatttgttgttctgacgaataacagttctattgttgctgtcatttttattgcagttgtattaggactctgtatgaattttatgcgggatgaacttcaaattgtaagaacgttagtcgaagatttgtctaaaatcactaacaaatatttggattttatcgtgaataaatgtggccctgtctgtattttttgcatgctcgtttacacatttcctgtatttggaatggagcagattactcctctgctgcactacatgctggttacttttatttgtcttattttttatctgtttattatgtatccactccttgtatcggcttactgtaaagttaatccgcttaaatttttaaaaaagacttttaaggttgcgatgtgggcttttgctacaaattcatcagcagcaaccttcccattaaccagaaaaacgtcagttactgagttgggatgttcggaagaagtggcagatttcgtacttcctatgggcatgacgattaatatgaatggaacaacgatagaacatattattgcagttgcgtttattgctacggtagcgggctatgaggtgacccctctggcttatctgacgataatgctgctggcaatcggctcttccgctgggacaccggctgttcccaatgcaggtacagttatgctttatgcgacaatgacaggagctggatttaattctgatgtgtgtattcttctttatacgctgctgctgactctcaacaaaccgatagatatgaccgtggtttcgctaaatgtagtgggagatgcggctacagcgtgtgtagtatcagcatcagaaaattcattaaacagacagttgtttgaaagttagctttgccagccgcttgacctaatcttaatgctatgataggggagggcaacggttatagtaatggtgataaaggacgggatggtaaaatccattccgtccttacacttaatttaaatcgtaatcaaattgaaagataattcttcttgaacatttttccttcccctgatagaatgtatggtagagtattgtatacaacgggaggaatttatatgaggaagagaggaatcactgtttttaccctctccatgatgctggcgctggggacggcgacgctgaccgcatatgcggcaggatggcagcagtcagggacagactgggtctattatgattctaataattataaggtaacgaatgaatggaagaagggagccgacggtctctggcgttacctgaactctcagggggttatggcagtaaattcctgggctgatgatgaatattacgtggataataacggcattatggtcacaaataagtggctgaagctgcagaagaagaatccgggctgggatgaagagaatacgatggtctggtattacttcagcaacagcggcaagataataacggacggctggtcaaagattgataataagtactattattttgacagtgacggtgtaatgcagacgggctgggtggacgacgatacgtattatacaggttccgacggagcaatgcgtacgggctggcagtatttacaggatccggaagataaagattcctttgatgataagacagtgccttttgaggatgatgaggacaagcactggtattatttccaaagctccggcaagaagtatgtgccgaatatcagcagcggagattataaactatataagatagacggcgtttattactgtttcagcgagacgggggcaatgcagaccggctgggtgaacatgggggataaggccgatggaagctttgaaaattaccgctttttccaggagaacggcaaagtgcagacagggtggtactcgtcaactccgccggaagacaatgatctggatatggatttggggaatgaagtggagtggtactatttctccagcagcggtattcctaaggtagggccgccggcagaagaggcatcgaccagcgatttagtaagaatcaacgggattacatatctgtttaacgagaaggggaatccggtttacggactgagacgacttagaatcggaaataccgatgaatatgcctgctattactttggcaacaaggcaacaagctctgttgtgaaagggaagggcacggtggaagagggagacggtaccaagagcgatttctatttcaccgaatcaggaaccaaagcagggcgcggttataccggtgtcaaagataattacctgttctatatgggcaagcttcagaaggcggaaagcggaaccaagtatgaggccatcaagattgagaataaggtttatctcgtcagtacctcgggtaaaattgtaaaatccactaccgttaaagattccagcggaaccaagtataagacgaattcctccggacagattattcaggtggacgagcagagtgatgatgggaagtcactggcacgcgagccgattgagcctgattactgggaagattaacgggaactgccgcaagatgtaaaacggaagacagatggaaaacagatgaatgataaaagaggatttcttgcaggttattgcatgaaatcctctttttgccgattgatggcggtaacctgtgcgcggagcgtgcagtttatcgttctggctttagccagttgaaggcattggagtttttcgtgttccgaaaaatgataatgcctgaaacaggaaaccacctgctttgcgggtggtgcagcaagtgcttatagcacaaaaatcacctttccgatagaatagagttgttcaagctactatctaagaaaggaaaggtgattttaatggcacacaagaaacatgatatggcacatacaaagtggatgtgcaaataccacattgtgttcactcctaagtatagacgaaaaatgatttataatcaatataaagaaagcatacgagatatattaaaaacgttatgcggatataagggagtggaaatactggagggtcacttaatgccagatcatattcatatgctggtaagtattccaccgaaatacagtatatccagctttatgggatacttaaagggaaaaagtgcgctgatgatatttgataagcacgcaaatctaaagtataaatacggaaatcgtcacttctgggcagaaggttattatgtcagtacagtaggtctaaatgaggcaacagttaggaagtacattcaggaacaggagaagtatgatatagcaatggataaactgagtgtaaaggaatatgaggacccctttaaggggtagccggtattacaaacgccctttaaaggggggcgacgagtcaagggcatagtggcttgaacagagtgaaagccagcgtctttaggcgctggccggtaactgtccccttataggggcgagcaaaccacccgtttgacgggtggtcatgattatacctttctgaccggccggatatacttccaaaaccgctccggatcatgatagaaataaatgattctgcccggagtggtgtcgtaacagtatccggtgccggtgaaatcgaaatcagccatggctttttcaacgagatcttctacgctgcggttttcctgctcataatcaaagggcccgtgttcaaaaaccatatactcagcttccgggatatcggccatgagcatttgaggcggaatttcaccttgataatccatgggaaggcgtacgccataacactcggtgcgaggaaagccccaatcgcagagcctgccttccggatcgttgatataggccataagctggccgctgctgctgttggattcacttccgccgtcgtcgtccagcttgcctttaatactgtcgagtaagccgcaaatggtttcacagtcctgccccggaatgagactctgcttttgccagaaatcccaatatccgttgctttcatagtttttaatgtgcagaaatttgtgtgcgggaatggttacaaaataaattttaacatcgtccgtggattttatcatgccaatctctccgaatcctaaaaagtagcggtcgaaggagtttatttttgtacgaagaacgaccggcgtcggttttttgcggtactcgctcggagtgatgccataggttcctttgaatgcccgcgtaaatgcttcatgtgatgaaaaaccgtaatcaaaggcgatatccagcagacttttcctgctgtcccggacttcttttaacgcaaaggccaatttcctgtgacgcagatagtcgcggaactgcatgcccgatatttctttgaatttccttgttgtgtaatattcggaatagcccagcctttgggaaaggaaacgcagggtcagcgcttcatcattatagtgtttaatgcagttgtcaatttcatcaacaattacctgtatttgtttctgccattcgtacatgtgtttcttctcctctttcaaccaccctgtaatcattataaggatccggagagtgtgccgcttgattttacttgcggttattttgtctttttagtattgtccgattaagcaaaatgtaaaacaggccgccgttatattgcttctgcaacttcacggcggcctgccttacggcttgaatttgatttataagacagtcagcggatacttatccaatgtctccacctgtccgattattcttgcggccggacacttttcgttcagccgttttacaagttcgataccggttttttcgggaacagagatcaacagacctcccgaggtctggggatcgaacattaaatccgataatgaatcaggaacagaagggcctatattgaccagcttatctaaatactccctgtttttgtaagctcctgccggtaccagtcccatggcggctgcatcgacagctccgtccagggcggggagggccatggaatcaattgcaatactcagattactgccggccgccatctcatatgcatgtcctaacaggccgaaacccgttacatccgtgcaggcgtggatatcggagaaatgctccatggtttgtgcagcataccggttcagcatttccatggaagagagaagctccctctgctgtgggacggttaaaaggctgcctttccatgcagttgtgaggattccggttcccagcgctttggtgagaatcagaacatctccctgctgaatggtgttattgcgcagtatgcgatccggatgaacgaagccggttacgctcagaccgtatttcggaacaggatcctggatcgtgtgtccgccgcagatgatggcatccgcttcctgtactttttcataaccgccctgcaatatagcctgtaccgcagacttgggaagcgtctccgggaaacagaatacgttcatggcgagcttgggtcttccgcccatggcgtacacgtcgctgagtgcattggcggcggccgttttgccgtaagaataaggatcatctactatcggcgggaatatatcgacagtctggattaaggctagttcatcgcttatccggtagacggccgcgtcgtcgctggtttgaaagcctaccagcagattcggatcattaaatttgggtaaatggcacaaaacttgtgccagggcatcagggcctattttggccgctcagccgcggtgcgctgtcatagatgtcaataatatatctgccatgcgtatacctcctttgttctgttagaaaacacctcgttaagtgtatcgatgtgactcgcactaagctcgaaaacacctcattaagtgctcatagtacatcgatacactaaactcgggaagaacctcgttaagtgtatcgatgtgactcgcactaagctcgaaaacacctcattaagtgctcatagtacatcgatacactaaactcgggaagaacctcgttaagtgtatcgatgtgactcgcactaagctcgaaaacacctcattaagtgctcatagtacatcgatacactaaactcgggaagaacctcgttaagtgtatcgatgtgactcgcactaagctcgaaaacacctcgctaagtgctcatagtatatcacaggggatgtgggatggcaaggtggagggaggaaagcggggaggatgatccgcagaaatataaaattccggtggaagaatagaatgaattctgatacgatagaggatagttgccggcggatacgctgatagggaaagaggggaggacattgaataaattgtatacgcttattacaaacaatgaattggtaaaagagcgctacggcgcatacgggaaggaactgaacgtggaatatctggaggatgcgggctgtctggatgttttgataaaggcgagggacgcgattcacggagggagccgcctggagacacatccgatggcaggcagcatcaaaccgaaccaaaatccatacaagacggtgatgatatccgacggaaaggtggatccggaggaatttcaggaatttattacagtgatggagaacagcattatgacctgccgcaagtttcttatggagaaaccgctgcccgagtgggatgaaaaattgaagaaggatttccgctatatcgatcagtcgctgattgaaagtgcagtcagccgcatttagaagaaaaacagaagaaaagggaaagaccggcctgaaaaatggatccattcaggccggtctttttttcttgctgcacgaaaatgacaatgttgacaaatcgttgccaattgacagaatggtagatgtcaaaattccctctgccgtgagcaggaaggcggtcccggaatatggtttttaaaagcttgcgggggctgctcttttttggcatggaaattgcttatatttagagtgaatcagtaaaattcttttataagccgaatgggagtgtggatccggcttagggagaaagaaggaggagtggaaagatgaagcttgaattaggaattattccaatcagggatatccggttcggatctgaatccagggtagagggcggcacggttactgtgaataaagaagaattgaaagcaattctgctggaggacgggaatttgaagtcggtggagctggaagttgcacatccggggacagtatccgtattatgccggttaaggacgtgattgagccgagagtaaaaacaagcggggacggcggactattcccgggtatcatttccaaagtagccactgtggggagcggcagaaccaatgtgctgcgcggctgcggcgtggtcacggccggcaagattgtaggttttcaggaggggattattgacatgagcggaaccggagcacagtacactccgttttcgcagcttcacaatctggttgttgtgtgtgaaccaattgaggggatcgaaaagcacgctcatgagaaggcagtgcgcatggcaggcttgaaaactgccgattacatagggaaactggcaaaagacatcacggccgaaactgtggaaacatatgaaacaccgtccgtcaaggagggcatcaggctgtatccggatcttccgagagtggcgtatgtactgatgctccagagccagggacttatgcatgacacctacgtgtacggggtggatatgaaacagtctcttcccacgattctctgtccgacagagaccatggacggcgcagttttgagcggcaactgtgtatctgcctgtgacaagaatactacgtatcaccatctgaacaatccggttatcaagcatttgtttgaagaacatggaaaaacactgaattttgtgggtgtgattataaccaatgagaatgtgtaccttgccgataagatgcgttcctcggatgccacggctaagctgtgcgaatggctgggcgtcgatggggccattgtctcccaggaagggttcggcaatccggataccgatcttatcatgaactgcaggaaaatcgaggcaaaaggcataaagacggttatcatcaccgatgaatatgccgggcgtgacggagcttcccagtctctggccgacgcggatgcggcagcggatgccgtcgtaacaggaggcaatgccaacatgctgattaccctgccgccaatggacaaggtgattggttatccggaagtggcggatattattgccggcggatttgacggcagcctgaaagaggacggttctattgaagcggagctgcaggtgatcacgggagcgaccaacgagatgggattcaaccgtttgagcgcccggtaatatcagacagcgcgaagcgctttcaaacctgaatgattgaaaggaatgaataaaatggcaaaattaaagtttgtacattatataaatcagttctttgccaatatcggcggcgaagaaaaggccgattatccgcctgagatgagagagggcggaatggggccgggactggcttttgcccaggccttcggagaggaagcggagattgtggccaccataatctgcggcgactcctattttaatgagaatgtggatactgctacggaaacggttctcgggatgatcagagaaaaaaatccggacggcgtaatctgcggtcctgcattcaacgccgggcggtacggcgtggcgtgcggcacggttgccgcagcggtaaaagaacagttgggaattccggttgtaaccggcatgtataaagagaatccgggcgcagatatgtataagaataaggtctacatctgtgaaacaaaaaacagcgccgcaggaatgcgcgggcggtaaaaaagatggctcctttagcgcttaagctggtaaaaaatgaacccgtcggttcatcgaaggaagaggggtatatgccgaacgggatccgggtcaactttttcgaggaaaagacaggagccggccgtgcggtcgatatgctggtcaacaaattaaacggcagagagtatgtgacggaatacccgatgcccagctttgacagggtagagcccggtccggcgataaaaaacatggcctttgcaagaatcgcgcttgtcacatccggcggtattgtgccaaaggggaatccggatcacattgaatcatccagcgcctccaagtatggctgttataatatcgaagacgtgacggatttaacggaagagtcttatgagacggcccatggcggatatgatccctcctatgcaaatcaggatgcggaccgtgtactgccggtggatattattcgtgaatttttaaaggaaggaaaaatcgggagccttcaccaatatttctatacaacggtcggcaatggaacaagcgttgccaacgctacgaaatatgcgaaggaaatcggacagaagctggttgacgaccatgtggacgccgtgatcctgacctccacctgagggacctgtactcgttgcggtgcaacgatggttaaagcaattgaagcttatggtattccggtggttcatattgccacggtcgtaccgatttccctgacggttggagcgaaccggattgttccggctgttgcgatcccccatcctctcggcaatccggccctgactcatgaggaagagatggatatccgcagacagattgtcgggaaggcactcgaggccctgcagacccctgtgacggagcagaccgtttttgagtggaagaagtaagaggagcataacagatggacaaaatttatgatgtaatcatactcggcgcaggtcccggcggacttgcggcaggactttattccggcagataccgcctgtccacgctgattatcgaaaaagccagggacggcgggcagattgccattacagatgaaattgagaattatccgggcagattgtggagggggaaagcggcccttccctgattgaccgtatgaccagacaggcggccagattcggcgcggagcgtgcatgcgatacgattgaccgggtggaactcgaggggcctgtcaagaagctgtacggtaaaaaggacacatatcagtgccgggcactgataattgccaccggagcttacgcgcggccgattggatgcaggcgggagggcgaatttgtaggaaagggcgtttccttctgtgcgacctgtgacgccaatttctttgaagatttagaggtatttgttgtgggcggaggcgattccgctgtggaagaagccatatacctgaccaaatttgccagaaaggttaccgtaatacaccgcaggaatgagcttcgcgcggcaaaatccatccaggagaaggcattcaggaaccctaagatgaatttcatgtgggacagtgtggtggaagagcttcacggggacggaatcctgtccgggatgacggtcagaaatgtgaagacaggggaacatacgagagtggatgcggatccggatgacggtatgtttggcttattcggattcatcggcaacgtgccgagaagcgaattgtttgaagggctccttgacatggaaaaaggatatatcaagacggacgaagacatgcgcaccggcatttccggtgtctatgccgccggagatgtccgggtcaagagtttccgccaggtagtgacggcagcttcggacggcgcaattgccgctatgcaggcagaaaaatatatcgctgaactggacggccatgtttattgacaggccgattataagaaggaggtaacaccatggtagatttaaccaaggacgactttgaggaagaggtgctgaaagcaaaaggaccggttctcgtcgatttttacggagacggatgcgctccctgtcaggcgctgatgccgcatgtccatgcgatggaggacacctatggaaaacagatgaaattcacttcgctgaatacgacgaaagcacgcaggctggctatcggccagaaagtgctgggacttccggtcattgccgtttataaggatggattaaaaatccaggaatgcgtcaaagatgaggcaacaccggagaatatcgaggcaatgattaaagctaatttacaggcggacaattagaagtttaaggtaacagccgccccgttcaggagcgttgttatagatggatggttccggttggaactttaaaaacaggtaaggaggaacgcatatggcaattttgaaagacaaaaaggtcgttataattggcgaccgcgacggcattccgggccctgccatagcagaatgcgtgaagacggcaggcgctgacgtagtttattcatctaccgaatgctttgtctgaacgagcgcgggtgctatggatctggagaatcaaaaaagaattaaggattatgcagaccagtacggtcctgagaacatagtagtcgttctcggcgcggcagaaggagaggcggcaggtcttgctgctgaaaccgtaaccgcaggtgatcccacattcgcaggtcctttagcaggagtccagttgggactacgtgtttatcacatttgtgaagatggagttaagtcagaggttgacgaaggtgtttacgatgaacagatcagcatgatggagatggttttggatgtcgatgacattacgaaagaaatgaccaccgtccgtgaggaattttgtaaatacctgtaatccgtgagaggctgatacagaatccggagaatcggtatcctgaagaatataggaaaccgtcaggtatcaattcccggattctccacagctttcttccaaatttaacgaggtgaaggtaaaaacatgaatgggtatccggttataaaaggcgccagctatacactggcaatcacgcccgatatggtgttacataatgggacgacacagacgacggagagggtagtaaatccggattcagagtatttaaaagaacttccgggacatttgagaagctttgaggatgcagtgaattacataccgaatcaggtgtacatcgggaatgcaaaaccggctgatttagctgccacggaatttccttattacgataaaaaatggagcggagcggttcgcgaaggcagatatgggcagataatgccgcaggatgaattttatggattaatccaaatctgtgacgcatttgaactggtaatgcttgaacgggagtttgccgccggagtgaagaaaaagctggaaaaacagaagctttttacagaggaacagctggcggttttagataaaaatgacaactcatcagattatatacacgaattggtggaaaaagagcatgcagagggactgtatcacaacaatgtgcttgtcggagccgttaaaagagcacatgacgtggatgtaaacctgtcagcccatgtgatgctggaaaatcttgtgacaaaagcctcgaatgtcctctcccttctggagctggttcacaaagcaggggttgcccctgactctgtggattacgttatagactgctgtgaggaagcatgcggcgatatgaatcagagaggcggcgggaattttgcaaaagcggcggcggaaattgccggtttcgtcaatgcaacaggaagcgatgtcaggggcttttgtgcagggcctgcccacgcactcctgcacgcagcggcattggtgcaggcaggaacattcaaaaatgtggtagtgaccgcgggaggctgcaccgcaaagcttggaatgaatgccaaggatcatgtgaaaaaaggacttcccgttctggaggatgccattgccggattttcagcgctgctgagcgctgacgacggcgtcaatccgcagctttgtacggatatagttggatatcataccatcggaacaggttcagcgccgcagaatgtcatttcgtctctggtgacggcgccccttgagaaagcgggactgaagattccggatattgacaaatatgcccccgagatgcagaatcccgatatcacaaagccggccggcgccggagacgtgccggaggcaaactataaaatgatcgccgcgctgggcgttaagaagggcgaactggagcggagcgatatcaagtccttcgtaaaggaacacgggatgaccggctgggcgccgacccagggccatattccgtctgggataccgtatctgggagcaatgcgcgatgagatgcttggcggagaaatcagccgtgccatgattatcggtaaaggcagccttttcctgggcagaatgacgaacctcttcgacggagtgtcatttgtggttcaggctaacgacggttcggcagggtccgggaaagaagaggccatcgatgaaagccggataaaagccctgataggccgggccatgaggacgtttgcagaaggtctgatgggggaagaggaatcagcggagccataggaaagggagaaactatgtctgaaagaaaaatcaaggcgatgatcgcagagacctttcttgaggtggcggatgctctggaaacggggcggtatggcaaaaagccggtgattggcttcgcttcggaaggcagtgagcatggcagggaaaatatagatgaggcaatgcgtcttatcgaaagagcaggaaataaagcaatactgattgaaggcggagatatccacaggaaaatggaggagatgctggatgcaggagagatagacggcgcggtgacgatgcactatccgtttcctgtaggagttgccacggtaggtaaggtggtgactcccgcaagaggaaaacccatgtatctggcggccacaaccggcatttccgataccgaccgtgtgtgcggcatggttaaaaatgcagtctatggggtgattgccgcaaaagccgacggaattgaatcgccaacggtgggaatcgccaatgttgacggagccagacaggcggagcgcgccctgttaagattaaaagaaggcggatatgatatccgctttgcagattcggcaaggtcggacggcggcattgtgatgcgcggcaatgatctgctctgcggaacgccggatatcatggttatggattctctcaccggaaacctgatggtaaaacttctgtccgcctatacatccggaggaagttatgagtctctgggctttggctacgggccgggaatcggtcccggttacggccgtctgattctgattgtctccagggcctcgggagcgccggttatagccggagcggtggagtttgccgcgaatctggtgagccggggatggaaggaaattgccgccggagaattttcaagagcaaatcaggccggccttcaggaaattctgaaagaactgaatgcttccggtaaagagggagcagctttagataatgtaaaaatgccgcccaaggtaatttgcaccgcccagatcccgggcattgaagtgatggatctggaggatgcggtaaaaacgttgtggaaagccggaatatatgcggaaagcggaatgggctgcaccggtccgatcgtgcttatggcggaggcggagcatgataaagcagttgccgcgctgaaagaagccggatacatcggatgagagccggagggagagagggatactgtctggaaacagcacaggacagtgtcctccgaaaatcccgagtttcacggcgcgaaactgcgttttttgcagtttctgtgcatcgcgaagcgtgttattgtttacagcatgccgctttttggcatggtgtgaacagtaacagaggcaggatccgggcctgattcaaatatgagaattgacatacaatttaatacatgatagtataatgacagcccaatgggcctgttgttaggactgttaaaggatatggaggcagataggttgctggtgtgcctcgcggtcttcaaaaccgttgtggggggttaagagcctcccgggtgggttcgattcccacctcctccgttcaaaccatatccggggcagaaggagtgataatgatgggaaaaaatcaggaattactgagaaaactccctaaaattgatgagatgctgcaggatgagcatcttattttttttacggaaataatgccgcggcaggtagttgtggagacgctgcgcgaggtgattgatatggtgagaagagagataatcgatgggagaagagaggaaatcccggcggtggaggagctggccggactggtgaaacaaagggtctttgaagagcagggaaaaagcctgcgccgtgtcatcaacgccaccggcgttgtcctgcacaccaatctcgggagagccaatctatccaggagagcctgcgagagcgtattggaggcggccggttattactcaaacctggaatacgatataaagaaaggcagcagaggttcgcgccatgaccatgtggagcagttgatcaggaaaattaccggagcgcaggccgctatggtcgtgaataataacgccgcggccaccatgctgtgcctatcggcattggcccgcggaaaagaggtgattacctcaagaggcgagctggtggagattggcggatccttcagaataccggaaatcatggaagagagcggcgcgcacctgctggaggtcggcgccacgaataagacaaaaccggctgattacagaaaggcgtttcatggagagatgaccggcgcgtttttaaaagtacataccagcaattacaagattgtcggttttacgcaggaagtatcgattcgggagctggcggctttgagggatgagtcggaggaattttctgttccggttatttatgacatgggcagcgggctgatgacggatttaagcggctgcggcatcggagagcctactgtgacggaagcgctgaaagagggagctgatgtggtgcttttcagcggggataagcttctcggagggcctcagtgcggtgttgtcatcggtaaaaaggaatatgtggaccggatgaagagccatcccatggcaagagcattccgcgtggataaaatgacgctggccgccctggaggcgacatttttcgaataccaggattccaagcgggctatgcgggaaatccccgttctgcgcatgattacggagacagggatacggcttaaagagaaggctgaaaagctgtgcggtcagctttctgaagcagcgccttccctggagtttatggtggagccgtgcagggatcaggtgggcggaggctctgcgcctctggtgatgctggaaggttatgcggtaaccgtatcaggggaggactttaacgccgagcgttcagaacggctgctgcgcaaagaggaacttccgatcattgcaagagtggcgcgcaataagctgtggctgtcggtgcggaccatcgaagagacggaatttaaatggatccgggaggcattttcgaaacagaatcaggtgaggtggcaggatgcataatgtaatagtcggtacggcgggtcatgtggatcatggtaaaacctgtctgattaaggcattgacaggcacggatacagaccggctgaaagaggaacaaaagagaggcatcacaattgagcttggatttgccagtctgtccggggaggaagggcagcacattggaatcatcgatgtaccgggacatgaacggtttgtcaaaaacatgctggccggaatcggcggcattgatctggtgctgctggcagtggcgctggatgagggggtaatgcctcagacaaccgaacattttgagatactcaaaatgctggacatacggcagggaatactggttttcaccaaggctgacatggtggacgaagaatgggcggatatggtggaagaggacacgaggaagatggtgaagggaagtttcctcgaaaatgcccagtctgtccgcgtatcttcttataccgggcagaatatagagacattgcgcaaaatgatactagaagcggttcgggatacggcaaaacgcagggatgagcaggaactgtttcgtcttcccatagacagagtgttttcaatggaggggtttggcacggtggtgacgggcacgctgctggaaggctgctgcaggctgggccaggagatagaagtctatccccagggacgcattgtcaagataagaggaattgaaaatcacggggagaaggcggaaactgcttatgccggccagcgcacggccctcaatctggcgggaattaagaaggaggaactggagcgcggagagattcttgcggctgtgggctccatgccggtcagccgccagcttgacgccagagtgcggctttttaaaagctcccggcgtctgctatgcaatggggaccgggtacacatcagttacggttcggctcagtccatctgtaaagtggttcttttggattgtgatgaaataaaagcgggagaagaggcctatgcacagctccggtttgacgaaccggtttccgttaaacgcggagatcactttattatccgcttttattcccctgtggagacatttgggggcggagtcatcctggaggcggacgccggaaaacataagcgctgtcagaaggaggcgccggatattctcaaaatcaaggaatacggccgggatgatgaagtattggaagcaattataaaggagagaagcagatattttccggagctttccgagctgtcgctgagactgaatgcagcccccgcccatacggaggagctgctggaaaagttaaaaaagcagaagaaaattctggccgtcaacggaaagagctgtattcacaaagagtactgggacataatcaccgagtttgcaaagcaatgcctgaaccgttttcatgaggcaaatcccattgcctccggtatcgaaaaggaggagctgaaaagccgtctgacggaacatttttatctgaaggatgcgaaacggtccgaagagcttttccaggagctggtgaaacgcggcatcgtgaccgtttccggaagtacggctgccctgaacggttatacgggaggctgttccggtgaactgtccggtatgatggaggccatacgggagcgttaccgcttagccggtgtggaagcgccgacgatagatgaagtgattaacggctttaaggataaaaagcaggcccggcagattattacggaactggtcaggcaggatgctctggtcaaagccgcccccggcatctatatgggaaaacaggaatgggaaaaggcggtttttgtcctcgaaaaccatctggatacgcatcctgatatctcacttgcagagtaccgggatcttctgggaacctccagaaaatatgcagtcatgctgttggatgcatttgaccagcgcaagataacaaaaaagcagggggatgtccgtatattatataaataataaagggagagtgggagcagatgaatatcagtcagaataaaagaaccttaatgatgagcggagcggtgatgggcctgttgggcgcgcttctggcctttatgggaaatccaaagaatatggcaatttgtgtcgcctgttttatcagggactctgccggagccatgaaactccacacagcctctgcggtacaatatatgaggccggaaatagccggattcgtctgcggagcgttcctgatagcagttataacaaaggaataccgttctgcagccggttcttcaccgatgctccgtttccttctgggcttcatcatgatggcaggctccctggcattccttggatgcccgctgcgcatgctcatccgcatgtcggccggagatctgaatgcctatgtcgggctgctgggctttggcgcaggcgtattcaccggtacggcggcgctgaagaggggatttaccctgggccgggcctatccgtcgtcaaacgggtcgggggcggtgctgcccgtacttctgatagttttgcttctattatataatgttacagcattatttgccagcagcgagacaggccccggcagcatgcatgcccctgttctcgtatctttggccgcagggcttatattcggtgcaatagcccagaaaaacagggcctgctttgcgggcagcctccgtgacgtgtttttgatgaaaaactttgatttgttatcgattatcggcggctttttcatcgtaatgcttgcttttaacctgttgacgggcggttttaaactttcatttgagggccagcccatttcccattcccatcatctttggaatttccttggtctgtatgcggtggggtttgctgccgtactggcgggaggctgccctctgaggcagcttgtgctggccggtcaggggtcgtccgattcagcggtgactttcctgggactgctggtaggagcggctttttgtcataacttcgggcttgcggcaggggcggcggcagcagctacggagacggcagaggcagtgtcaggcggactcacgccggccggaaagacagttctcgttgtcagtattggagtgctgttcctgataggatttaaaaagagagagaagacagataaaaaataataatcaggaggaatagagatgaacgaagtggatgcaagaggtttatcctgcccggagccggtgctgcttacagcgcaggcgttaaaatccggatccggcgtaccgctgagggtgctggtcagtgaagcatacgccaggcagaatgtggaaaaatatgcgaagagccagggcaggcaggtatctgtgacggataaagatacggaatttgaaattctgataaattagaagagatgggggagcgccgtgatacggaaaaaagagccgaaggtaattattacgtttcacactacggcaggggccattgaactggagcgaagctgtaaagccgaaaagattccgggccggattatacccgtgcccagggaactttcggcaggctgcggcctggcctggtgctcgcctgaaggtgaaaaagggcggctgggaatcctgctgaagaaggaaaatgttgaatgggaagatatggtgcagatgctgttttgaggaggggagtgattaggatgggaatttattttgataatgccgcaacgacgctgaaaaaaccggactgtgtgatcaatgcggtgacagaggcattgaaaaaccttggtaattccggccgcggggcctatgaggcttccatggatgcgtcacgccttatttatgacacgcgtgtgcaacttgcagcgctgttccacgcaggggaaccgaggcagactgcatttacctccaattccaccgaagctctgaatacggcaattttagggctgttacaaggttccggccatgtaataaccacggtgatggaacataattccgtgctgcgtccgctttaccggctggagacaatgggaacagagctttcatttctgagctgcggtgagaggggagagcttcactgtgaaggactggaggcagccctgcggcgcgataccggagcggtcgtctgtacgcatgcgtccaatctgaccggcaacagcgtggatttgaaacgaatcggaaacttttgccgcgaacacaatcttttattcattgttgacgcatctcagacagccgggaccctggagattgatatgcaggccatgaatatagacgtgctgtgttttaccggacacaagggcctgtacggtccccaggggaccggagggatttgtgtccgggagggattgcatatctcaccgctaaagtcaggcggaagcggtattcagacttacaataaagagcagccttctcagatgcctgcggccctggaagcaggaaccctgaacggccatgggatagcggggcttcatgccgcgctgtcgtttatagaagaagttggcgtggaggcgattcacggcagggagatgaagctgatgcggaaatttcatgatggagtaaaggagattcccggcgtgcggatttacggagatttttcagatgacaaccgcgctccgattgtggcactcaatatccgggactatgactcagcgcaggtcagtgatgagctggcagtcggctatgggatttccaccaggccgggcgcccactgtgcgcctctgatgcaccaatccctgggcacagtggaacagggcattgtgcggttcagcttttcctggtttaacaccgaggatgagatagaaacagggatacgggcggttggagagatggcaggtgtataaataataaataaaggtaatgaagaaaagggacactgactgacgcggtgtccctttttcaacccatttgagggcatctgtatgtttctttaaccggctccccgtttagaacgggggctgatttgccctctttgtcaggcgtcctgttttacatgatcttcagtcatgaattttgtatagttcggatcaatattatagcgcttcatataaatcttgtgcaaaatgatctgcaggaaaaacagcatgactacaccgattggaagcagaacaaacggcgaaatctcggtaaagccgaatatcaggtataaaactgcgatgacacctcccacagtcagcgcatatggaagctgtgttccgacatggtcgatatggtctgcaccggagaaaatggaggccataaccgtggtatcggataccggtgaagcatgatcacccagaatagcgccggaaagaactgcgccgcacatgccgactgagaattctacatcaccggtgagcgtatagcctaactggatagccaaaggcgtcatgatagccattgtgccccaggacgttccggtggcaaaggcaacgagaatggaacatcctaaaacgagaagcggaagcagaccggtcgggatgctggcgccgacatactgagctacgaaagcgcccagccccatgcttttggtgacggagcctaaggaccatgccataacaagaattgctccggttaaggccataagcttaaaaccgtctacaatcgtattcatcgtttcctcaaatgtcatgatatggctggtgagggcgatcacaattcccgttaccgccatgccgaaggaaccccagtaaagagccatctgcgcgtcacatgcgtcgagaattgccataatgccggtggcggttctggccggatttgtgtagcccgtgtaaatgataccggatataataatcgtaaacgccactgcaatcgggaggacgaaggagcggatcattggtttggtgcgtttcggttcgcccagttcattgccgacatcaagcatcgggtttgcatccggcttggtgtactgccccgtttttagggcacggacctctgccttcagcatggggccgtaatcgcgtccggtatacattaacatgcctacgaaaataagagtgaatatagaatacatgttaaacggcagaccttttatgtaagcgctgaccggtgaaattccggtgattccggcctgttccagaccctgttcgatcatactgatctgataggcgatccagtcggaaataaataaggcggccgcaggagctgcggtagagtctaatacataggacagtttctcagaagaaattctgtaatccttgcatatgtcacggaagacattgccgtcaacggcggcaaccagacaatcgttgacggagcaggccattccaagtccccatgtgcccagacaaacagaacgtctctttttaaaacgccttttcgcggcttccgccagtgcaaagctgcccccagcttccatatgaaggaaattccgacacccataaagagggtaaagagtaacagtattacattatccgccatattgctggaaatgacagataatgcataggagcatgcccccagcgggttccagctgctgatgatcagtgaacctgcaaagaggcctgcgaacatggagattagaacctgctttgtcgcaaaacataaaccgatagcgatgataggtggaactaaggccagtatcccatagttgacttgcatatccatatatcttcctcctttttgtcggccggccggtgtcaccctcatttttattattagggatgcacccctccgttaagccggccgcttatgccggattaaaaagcaaataacgtgccaaaaaggacgaatgaggtgaagaaaaatgaaaagtgtatggataacaggcaaaaaaggacagatagaaaatatatttacaagctggtttcactaaaacgagatattaattgtcagttaaatgacagtttgaaatgacatatggtaaagtctgtcaattaaatgtaaagaactttatcgtggcagtgtaatatcaggctgctgtatattgaggcggttaagcttgcggtaaagtgttctgagactgattcccagctcggctgcgatttgtttttttccctctaaggtatacccgtatttttccagcagcccggcaagcacctgctctccgctgtttcgcaccgcggccggtccgggttccgttttttcacatggccgtgctttcaaagtcaggatttccggcaggtctgccggagtcagcgtatccgtctcacagagattggcagcatattcaagcatattctgaagctcacggacattgccgggccagtcataggagaccagcagttcctcagtctccggagcgaactttttcagaggggtccggattctggaccggagatgctcgagatagctggcggcgataggcataatatcttcccttcttgaacgcagaggcggcagcttcagattgatcacattaatcctgtaaaacaaatcccctcggaatgtgcgctctgccaccatttcgctgaggctcctgtttgtggcggcgattattctgatgtccagatgaaccttcttattagaaccgacccgttccaattcatattcctggagaacccgcaggagcttgggctgggcaaacagcggcagctccccgatttcgtccagaaacagggttcccccctgtgccatttctattttaccgattttaccgccttttttcgcaccggtaaaagacccctcttcatacccgaacagctcactttcaaataaagtatcgggaatacccgaacagtttactgcaacgaagggatatttactgcggcagctttgttcgtgaatggcgcgggccaccagttccttcccggttccggtttcgcctgtgattaggaccggggtagggctgtcggctacttttttaatcagccggtggattgtttcaatctgagagctctggccgacaattcttccaaaaaatccggattcggcctccggctcggatagctctccggaaagccggatgaaaaaagcgctgatttgctctccgttcatgacggcccgcgtcgtgatcttagtagccatgtttccaatcgtcacgtttttctcgaacaggttagtgccgtccatgatttttctgacaacggcttccggaaaaagctgccagagggatgaacttgtactgttgcagaatttaagaaagttggaagccatctggttatactgcaagatcactccgtggggatcggtgagaagcaccggctggggcatagctccatggatgcggccagtgtggcgtccagattggcaaaaccgctctttcccgttttattggccagaagatctcctatcaggttggccagttcggtgattgcattcaggtaaacagccgtgctgtcaataatgcgccgctgtccctcttttgtaaaagaagtaaaagatgccactcccgcgatttcagtaccggcatgaatgcagcacagaacctctatcgtggatggacagtgttctttaaaacggcagccaatgcaggacggcatttcaccgggcttgttgacaagaacgctgccgttttcaatgacttcccgtataaagggcgcgtgtaccacgcggccttttttctttaagtaggtaggggtgcagaagaaaaggttgctgctgtcgtcaaagatagcgatttccagacggagcgcatcgctgacggcagtcaccagcctttcggccgaggcacggatttcctccagatttgccatgttattcctcctcgtataataagtttgtaagcaagaaaaaccgcttacagacttattcttttttgggtataaatggtaaggatatctaagaggtactcccctcatcccgattcccatctatacagttgatagttacatttcaatataggtagatcctgtggtatgatatcaggtagagtctgatgtccgaaggcactgcttctcctcctttcagccggcttcgtccgagactgctttgaaagcattcagcctggcacatacggcacattccgctgacacagaattttcatccccagccgttagccccagcaaaaaaggctgactgggtgcatgctcattgcgcgagggttcggtcaccgtatgcggcacaggataaaccttttgcttcaggcttcacaaatccccatcggaatggaggtgatatcatgttaaagctcaactatatgtccaccttgtttgtaggtattgatgtaagctcaaagaccaatgccgtctatgccatggactttgaggaaaacaaatacatctcatcgtcgtttggcaataaccagccaggcgccgatcagcttgtaaatatgattgccgaatgcatgcagaagcataaaaacctggatacggttcttatcgtgctggaatctacttctgtatacagcgtgcatatttcaaacttcctgtcggccagcgaggttctcatgccctacaggccttacgtattctgtgtaaacccaaaggccgcttcgaattaccgaaaatcctatatcggaatggaaaagaccgatcccacggatgcatatctcatcgcggacttcggcagggtaggccgcacgaaaaaactggagccatggcgcggcgggcagttcatatccctgaaacgccttacaaggcaccgtatgcacctttctgagtgcatcaccagggagaagacttatatggtttcgaatctttatctgaagttcagtgaacttcagctccttgaaggtgatgacaagccttttggcagtctctatggtgccacgtcctcagctgtcctgacggaatttttgtctccgcaggagattatcgatatgccggaagaggatctgcttaccttccttgcggggaagagcaggaaccgcatctctgacctatcaaaaacttcggaactcctgcgcaaggcagccagggattcctaccggttagacaagtgcatgtatgaaccactgagcatatcactggcaagctcgtttaactgcatccacgcctatcagaaagaaatcaagctgatcgagcaggcgattgagaaatgcatcaacggaatgaaccctaacgccctgctcatccttcaatccatacctggaataggtccgatatgggcatccggaattctatcagaaataggcgatataaccgtgttccattcatccgatgcccttgccaaatatgccggcctttactggcctaagggtgattccggagatttcacttctgaggacaacaaaatgtcgaaagccggaaatccctatcttcgctgctatcttggcgaagcggcaaacagcgtcaggaagcacatccctgaatatgctgatttctatgccagaaaatatgctgaggtaaccaaacatcagcacaaaagagcactcgcgcttacatctcgtaaattagtacgactcgtttttggattgctggtcaaaaaccaactgtacaccggcgaaaagctggacaccgaatataatattgagtcgaactgacattcggttatacgtaaaatataccgaaggtctgttaaagttacccttttttctgaaaaacatatcaaaatcttcttcaaaaagttcttgacatatcaccagaatgctttattgatggtgatgctgagtgcccatatgaaaacatgtgtgggatttagcgccggattactgcggcggacgcagaaaccgtttatacgcggaataatgcccgctgtgctatgcggacattataccatatattcaggagcaatgacagtaaaaatggcaaatttggcaattatgtgtcaattgacaataattgacaaatgacaagcggtaaatcgcaattttggcaattttatttggtattgaaaaggagaggaatgaaaatatatggtagaatgtagacctgtgattttttataaacgataaaattcccggattttaatgggatattgcagactttaaaaatattttcaacgtaaaatccaaatctgagcaaaaattctgtgaaagttggcacgatgattgctaaatagtaggacagaaagtgttgactcccgctttggtaatttaaaagggagatgagaggaaatctaaaggaggaaaagaatgttagaaaagaaagaaccattgaatttgacaggcagggttgcagttgtcacgggcggaagttcaggtatcgggctgggagttgtggagattttatcggcatatggagcgaaagtcgccatggtggacatcagccccaaaggagaagaaaaagcacaggaactgagagcggccggcagggatgttaccttttttcagtgtgatgtgacgagtgaggaacaagttaaaaagacggtggacgatgtggtgacgaagtacgggccaatcaatattttacataacaatgcaggcgttacggtccgtaaaacaatcgataaccttacggaaaaggaatgggattttgtactcgatgtaggtcttaagggaatgttcctgttttccaaacatgtaatcccggtaatggaggccaacggcggcggaagcattatcaataccggctcgggctggggactcaagggcggagatcaggcggttgcctactgtgcggtgaagggcggtatcgtcaatgccacgagggcgatggcgattgatcacggcccgaagaatatccgggtgaacagtgtaaatccgggcgacaccgatacggcgatgctgcgcgacgaaggcaggcagacgggaatagtaaaagaagaagcggatcaggacgcttacttaaaggactgcggaacagacaggccgctcaaaagaatcggaatgccggaggatattgccaatgcagtattattccttgcaagtgatttatcaagctgggtgacgggagcggcattagtagtagacggcggcggaatcgcttaaccataaaatatagatattcagcatataaaggaggaaacaagcacatgaaaggatttgaaagccatccttacataccaaactcggttccggaagtacaggaggaaatgctccgtgaaatcggtcttggctcattagaggagcttcataagaacgtacccgaactgttgaaattaaaaaatgaaatgaaccttccaaaggcatttcgttctgaatatgaattgaaaagacacgtggagcgtgtcctctcaaaggatacggactgtcacagaaaccttaatttcttaggcgccggctgctggcagcactatgttcctgccatttgcgacgaaatcaacggcaaaggcgaatttcttaccgcatacggcggagagccgtataatgacgagggacgcttccagtcgctgtttgaatatgccagcatggttgcggagctggtcgatatggaagtggtcaatgtgccgacgatggactgggcgcaggcggccgccacgacggtcaggatggctcagcggattacgaaccgttccgtagtcctggttccggagtatatcgatgccgaaaagctgaaaatcatggaaaactatgcagagtcatgcctccgttttgagaaggtaaaatgtgatgagagaggactcatcgatttatcggatctgaaggaaaaagcaggcgcagatactgtcggcatatattttgagaacccgggttatctgggtgtgattgagcaaaacggacaggaaatttccgatatagtacatgcggccgggggactcagccttgtcggcattgatccgatttccctcggggtactcgcaacgccggcatcctacggcgcagatatcgtctgcggtgatttgcagccgctgggcattcatatgaactacggcggcggccagtccggctttatggcgactagagatgaagaaaaatatgttatggaattcccgtcccgtctctttggcattgccccaacgacagagccgggagagtacggctttggagacgtggcttatgacaggacgtcatttggacaccacagggagcacggcaaagaatacgttggaacccagtcggctctttggggcattacggcaggggtttatctggcgaccatgggcccgcagggcatggaagaggtgggacagattatcatgtccaatgcgcagtatgcagccgctaagataaatgagattccgggagtgaaggccaatccgttcggcagcgtcttctttaaagaattcgtcgtggatttcagcggaacaggaaaaacggtgaaacagattaataaagccctgcttgataaagggattttcggtggcaaggacttatcggaggatttccccggactgtccgagtctgctctttactgtgtaaccgaaatccatacgaaagaagatatcgatactttaattaaagcgctttatgaagtcaccaaataagctttcagaaaggaatgataacgtgaaaagaatagatagatcagaaaaggtcagagttcatttccaccaggcaaaatgggatgagccgataatttatgagcttagcactccgggcgagcgcggaatcttagtgggtgctccggatgaagagatagccggacagacaaaaggcattgatgcgcttccggaaggtatgaagagaaatacgaagctgaacctgccggagctttcccagagccgtgtcttaagacactatgccaggctggcgcagcagactctgggcgcagatgttaatattgagatcggacagggcacttgtacggttaaatacagcccgaaggtaaatgagcagttatctgctttaatccgcgaatatcatcctcttcaggatgcggatacggtgcaggggatgcttgagatttttcatgagaccgacaaatacatgagtgaaatttccggtatggatcatttcaccttccagccgggcggaggttcccagggaatcttaacgatggcctcggtcatgagagcttattttaaagataaaggggaagacagggatgagattatcacaacgatttattcccacccctccgatgcggccgctcctgcggtagccggctttaaaatcgtttacttacagccggatgagaagacgggcgttcccgatttagagcagctcaaagctgcggcgggacctaaaacggcaggttatattgtggcaaatccggaggataccggcgtttataacagccatgtgaaagaatttgtggattatatccattccatcggcggtctttgcggatacgaccaggcaaatgcaaacgggctgttgggcgtcacaagggcaagagacgcaggctttgatatgtgcttcttcaatctccacaaaacattctccacgccccacggctgcggcggtccggcctgcggagcaacgggagtgcagaaggatctggttcaataccttccggctccgattgtggactatgacggtgagaaatatttccttaattatgacatctgcagtaatccgtgcgcagtgggtaaagtaagggaatggtacggcgtggctccggttgtgctcaaggcatattgctggatccgcagcatgggaccggacggcctgtatcaggtggccaagaccgcagttctcaataataattatatgtttaagaagctgatggagcttccggaggtgactgcctattatgaggacggcaacaaccagagaatcgaacaggcgcgctattcgctggagacgatggaaaaagaaacaggtatcagcacactggatatccagaggcgcatgatggatttcgggatgcattactggacctcccatcacccgttctatctgccggagccgatgacgctggagcctaccgagacaccttccaagaaagatatcgatgaatatatcgagacattgaaatatgtatttaaagaggctcatgagaatcctgatatcattaagacggcgcctcatagaagtgtcactcatcaggtggatgaatccggtatggatgatccggccagatgggcaacaacatggaaaatgtacttaaaaaaatacagcgattgagattctttgtgatacactatatattaatagaagaaactattaacgcaatgcggttgtagaagacgctgtgatacagatataagaaggactgctttgaagtgggtatcattttaaagcagtcctgctttttatggagggccgatgaagaagctaggacttattattaatcccattgcaggcatgggcggcagtgtggggctcaaaggaacggatcatgtggtggaggaagcaatcaggcgcggagcgcagccaagagccggagaacgtgtaaaagcggcgctcacaaagcttattgaaatcagagatcagattactgtttatacatatcccggtgatatgggcggagagctggcaaagagccttgattttcccacggtgcttttaacggcggccggaacggacgctgtggacgcggattcggggtatacggctgcaggacatacggatgcggcagatacaatagagctggcaaagaagcttttggaagaacaagtggacctgctattatttgcgggaggtgacgggacggccagggacatttacgaggcagtggagctgaaggtgccctgtgtgggaatcccggccggcgtaaagattcattcgccggtctatgcgaaaaatccccaggctgccggacggctggctcttatgtggctcaccgggaaggtgcagaagacggaggaactggaggttttggacattgatgaagagcggtaccggagagaggagttaagcacaaggctttatggttatcttctggtgccgagggaaaagacgctgacacagaaccgcaaagcgccgacccccgtctctgagacggcatcgattgaggcgattgcctatgatataatagaagcgatggaaccggagacctgctatctcatcggcgcgggaaccacgaccaggggaatcatgcatcttttgggtctaaagaatactctgatcggagtagatctgatatgcggcaaaaagcttgtggcggccgatttgtacggggatacgattttgtcatatattaaaggaagaagaacaaaactgatcgtgacggtaaccggaggccagggctatctgttcggccgtggcaaccagcagcttaccccggaggtcataaaagaaatcgggaaagaaaatattatcatactggcgacaaaggcaaagctggcggcgctgggaggacggccgctgctggtagatacctatgatgaggcgtgtaatctttccctttgcgggtattaccgtgcggtcaccgggtatggggaatatacaatgtgcagggtgacaatagattgatgagtaattgaggatggaggacgcgtccggaacggaccggggccggtgtggcgagggggagtttttctgagtcttccgtccccggttggaggttgtcgtgaggggggaatccggccggaatgaattgttacggggaccgctcgcgcttattggagtgcgcagcggaatgctaagctcgtgagggacctcgctaagcaccggcggactcccatgtcccctgcacaattgattccgcctacttccccggttcaggttatcgccggggacaaaagactcaggcgaagtttttctcacaccggccccggtccgttccggacgctgattgtctccagcctcaatgggggaggtaaccttgtcgctgccactacatattaccaataactaacagtaggaatagcgtggtagttctttaattaaatattacggtgatattacaccaaacgataaccggcacgccccacgcacaggtcaccgccaatcacagcaaatatactcaagcaactacatcagcccatatccaacatatatcaaacgcatatggatgcgctgagtggccgcgacaaggtccgccctcgcacttaacgcgtgagacaatcagcggccgcaggccagtggacggggccggtacacccggcggagtcttttgtcccggagaaaatatacctttggggcggaggagactatatcctctccgcagtcccagcccacacgacaacctatccccgggacgaaagactcatccaactaccctcaccccgtccgctggccgtaccggcggcgtcctcacctgcataattaaatcccaataatacaaaaaaatatgaaaaaaatccttgcaatccctgtaaatgtatgatatgctatcaaagctgtggcatgatagctatgaagcgtgaggttgctgcctgaaacagggcaggttttccgtggagcgaatgtcaagtcgaagaaactggcgacaagtcactgtacaactacagaaatatcccgaaaataaagaaggattccgtgtgaggtctaagatgacacacccgggcatgtgtacagtcaccgcttgtcgtgcttaaatagtacgaaaaggaggcgactttttttatggcaagtcaagtaatgagaatcacattaaaagcttatgatcatcagctggttgacacatccgctgcaaaaatcatcgagactgtaaagaaaaacggatcaaaggtgagcggaccggtgccgttaccgacaaagaaggaagtagtaacaattttaagggctgttcataagtacaaagattccagagagcagttcgagcagagaactcacaagagactcatcgacatcattgctccaagccagaagacagttgatgcactgcagagactggaaatgccggctggcgtttacatcgacgtaaagatgaaaacaaaataagctgcaaaatcagcagcaaagcattcaattcaatgcatatcctaacagatttagatagatttctggactgttctaggatgaacgcggcgagcaaagcttactgcgttccgctgtagaaaaagacaggaggtcaaataatgaagaaagcgattttagcgacaaaagtcggaatgactcaaatcttcaacgaagacggagttttaactcccgtaactgttcttcaggccggaccatgtgttgttacacaggttaagacagtagagaacgacggttacaaagcagtacaggttggtttcgttgacaagagagaaaaacttgttacaaagccagtaaagggacactttgacaaagcaggcgttgcttacaagagatttgtaagagaattccgttttgagaacgcagaagagtattctgtaaaagatgaaatcaaggcagaaatcttcgcagcaggcgataagattgatgttacagctgtttccaagggtaaaggattccagggcgccattaagagatatggccagcacagaggacctatggctcacggctccaagttccatcgtcatcagggttccaacggttccgcaaccactccaggccgcgtattcaagggcaaaggaatgccaggacatatgggaagcgtaaaagttaccatccagaatctggaagttgtcagagtagatgcagacagcaacttaatccttgttaaaggcgcagtgccaggacctaagaaatccttagtaacagttaaagaaacggtaaaagctggtaaataagctttacaggaaaggaggaacacacagatggcaaacgtatctgtttacaatattgaaggcaacgaagttggcacattagagttaaacgattctgtattcggcgtagaagtgaatgagcacttagtacaccttgcagttgtggctcagttagctaacaaacgtcagggaacacagaaagctaaaacacgttccgaagtttccggaggcggtagaaaaccgtggagacagaaaggaaccggtcatgcaagacagggttctacaagatctcctcagtggacaggcggcggcgttgtatttgcaccaacaccacgtgattacacaatccggttaaacaagaaagagaagagagctgctcttaaatctgcattaacaagcagagtaaatgagaataaattcatcgtagtggacgctatgaatttcgatgaaatcaagacaaagaaattccagtctgttatgaacaacctgaaagtaaacaaagctctggttgttttagatgacacatgcggcaatacagtattatctgcaagaaacattcctacagttaagactgcatccgtaaacacaatcaatgtatatgatatcttaaaatacaacacagtagtggcaacaaaggctgctgtagcttctatcgaggaggtgtatgcataatggcaaacgtacagtactatgacgtaatcctcaaaccagtggtaactgagaaaagcatgaacgctatgagcgagaagaaatatactttcttagttcatacagaagcaaacaagtctatgattaaagaggctgttgaaaaaatgttcccgggaacaaaagtaaagagcgtcaatacaatgaatctcgatggtaagacaaagagaagaggtatgaccttcggcaagacagctaagacaaagaaagcaatcgttcagctgacagaagacagcaaagagatcgaaatctttactggcttataagtcgaatgcagcttggctgcaggtaactatacgacgaacactatgtcgtgataagaatggagtctgcaaaagggacggacggagaaaaacggaagtccgaaggggcacttcggaaatgcagaaaacgcatttcctcagtcgcgggcattcgccctgttcctgcgaatcaaaaaacctgcttatgtgcgaacacaacacaggttttctgcttcacatgaaccctgctcattgctgacgcgcaaatttagaaaacgccagggggcgttgaacgaaaggagttagagtcatgggaattaaaacatacagcccatatacaccttccagaagacagatgaccggctctgatttctctgagattactaaatcaacaccggagaagtcattagtagtagcattaggcaaaaagaatgccggccgtaataatcagggtaaaattacagttagacatcgcggaggcggtgctaagagaaaatacagaatcatcgatttcaagagaaatgcaaaagacggtattccggcaacagtattatcaattgaatacgatccgaacagaacagcaaacatcgctttaatctgctatgcagacggcgagaaggcatatatccttgctccggccggattacaggttggaactaaagttatgagcggcgcgcaggcagaagcgaaagtcggcaactgcttaccactcagcgcgattccggttggtgctcagattcataacatcgagctttacccgggaaaaggcggacagttagttcgttccgcaggaaactccgcacagttaatggctaaagaaggaaaatacgcaacccttagattaccttccggtgagatgagaatggttccgattatctgccgcgctacaatcggcgttgtaggaaacggagatcacaacctgatcaacatcggtaaagctggtagaaaacgccatatgggcttcagacctaccgtacgcggttccgttatgaacccgaatgaccatccacacggcggtggtgaaggcaagaccggtatcggccgtccaggtccatgtacaccatggggcaaaccagcacttggtctcaagacaagaaagaaaaacaaacagtctaacaagttaatcgtaagaagaagaaacggtaaacagtagttatcaaggaggtaattcaatgggtcgttcacttaaaaaaggaccatttgcagacgctcatcttttaaagaaagtggatgatatgaacgcagcaggccagaagcaggttatcaaaacctggtcccgccgttctacaatcttcccgcagatggtaggtcatacaatcgcagttcatgatggcaggaaacacgttccggtatatgttacagaggatatggttggacataaactcggagagtttgtagctacaagaacttacagaggccacggaaaagacgaaaagaaagcaggccgtaagtaattttacgcttttgaaaggaggtttcaccaatggctaaaggacatagatcccaaattaagagagagagaaatgcacagaaggataccagaccgtcagcaaagctgtcttatgccagagtatctgttcagaaagcatgtttcgtattagatgccattagaggcaaagatgtgcagactgcactcggtattgtaacttacaattccagatatgcttctactttaataaagaaattactcgaatcagcaattgccaatgctgagaataacaaccagatgaatccggagaacctgtatgtggctgagtgctacgcgaacaagggaccgacaatgaagagagttaaaccgagagcacagggcagggcttacagaatcgaaaagagaatgagccacatcacgatcgtgcttgatgagagataaaaggaggcaaatatgggacagaaagttaatccacacggcttaagagtcggtgttattaaagactgggactcaaaatggtatgctgaagctgattttgctgacaaccttgtagaagatcacaagatcagaacatatctgaaaaagaaattatacagcgccggtatttccaaaattgaaatcgagcgtgcatctgataaagtgaaaatcgtcatctacacagctaagccgggtgttgtaatcggtaaaggcggcgcagagatcgagaaaactaaaaaagagattcagaaattaactgacaagagagtcttcgtagacatcaaggaagttaagagagccgacagagacgctcagttagtagctgagaatatcgcacagcagttacagaaccgtgtatctttccgccgtgccatgaagtctgcaatgggcagatccatgaaggcaggagctaaaggtatcaaagcatccgtatccggccgtcttggcggtgcagatatggcccgtacagaattctacagcgagggtacaatcccgcttcagacattaagagcagatattgactatggtttcgctgaggcagatacaacctacggcaagacaggcgttaaggtttggatctacaaaggcgaagtacttcctgctaaaggaaacaaggaagggagcgataaataatgttaatgcctaaaagagtaaaacgtcgtaaacagttccgtggttctatggcaggtaaagctacaagaggcaatgttatttgctacggagaattcggtttagtctctacagaaccatgctggatcagatccaatcagatagaggcagcccgtgttgccatgacccgttacatcaaacgtggcggtaaagtatggattaagattttcccggataaaccagttaccgcaaaaccggcagagactcgtatgggttccggtaagggcgcacttgaatactgggtggcagtagttaaaccaggccgtgtattatttgaaatcgcgggtgtaccagaagagacagccagagaagcgttacgtcttgcaatgcataaacttccttgcaagtgcaaaattgcttctaaagcagatttagaaggcggtgataacagtgaaaattaataagtatgtagaagatttaaaagtcaaatcagctgcagaattaaatgaagaattagtagctgctaaaaaggaacttttcaacttaagattccagaacgcaacaaatcagttagataatacaagcagaattaaagaggttcgcaagaacatcgccagaattcagactgttattacagaaaaagcaaacgcataactgaacaagcagtggttgcggtaaatttgactggacaatagattcctagaacaaggaaaggagatatctaccgtggaaagaaatcttagaaaaacacgtactggtaaagtagtaagcaacaagatggataagacaatcgtagttgctatcgtaaaccatgtaaaacatcctttaatcggtaagatcgttaaaaagacatataaattaaaagcacacgatgagaacaatgagtgtactatcggtgataccgtaaaagtaatggaaacaagaccgatctccaaagacaaaagatggagacttgttgagattatcgagaaagcaagataattttaatatcagaaaggagtattgggcatgattcagcaggaaaccagattgagggttgccgacaataccggtgctaaagaattactctgtatccgtgttatgggcggatccactagaagatatgcaaatattggtgatattatcgttgccaccgttaaagatgcaacaccaggcggtgttgtaaaaaaaggcgacgttgtaaaagccgttgtcgtacgtactgtaaaaggcgcacgccgtaaagacggttcttatatcaaattcgatgagaacgcagcagttattatcaaagatgacaagaacccgaaaggtacacgtatctttgggccagtagcgagagagttaagagagaagcagtttatgaagattgtttccctggctccagaagtactgtaggaggtatcaactgtgcataaaattaaaaaagatgacctggtaaagattattgcaggcaaagataaagacaaaacaggaaaaattctttccgttaatacaaagaaaaacactgttctggttgaaggatgcaacatggttaccaagcattccaaaccatcagcagcgaaccagcagggcggcattatccatcaggaaggtcctatcgacatttccaacgtaatgcttgtcgttgatggaaaagcaacaagagttggttttgaagttaaagatggcaaaaaagtccgtgttgcaaaagcaaccggtaaagtgattgactaatacagagaggaggaacatttaagttggctagattaaaagaaatgtatcgtggtgaaattacagaagccatgatcaaaaaattcggatataaaaatgtcatggaagtgccgaagttagacaaaattgttgtcaacatgggcgttggtgaagcaaaagaaaatgctaaagttctggactctgctgtaagagatatggaaattatcacaggacagaaggcagtactgacaaaagcaaagaaatcagtcgctaacttcaagctcagagaaggtatggcaattggttgtaaggtaacactgcgcggtgagaagatgtatgagttcgctgatcgtttaatcaaccttgcacttcctcgagttcgtgactttagaggtgttaatccaaacgcatttgacggcagaggaaactatgcactcggtatcaaagagcagcttatcttcccggaagttgagtacgataaggttgataaagtcagaggtatggatattattttcgtaacaactgctaagacagacgaagaagcacgtgaacttttaacactgttcaacatgccatttgcaaaataataggaggatttatcaatggctaagacttcaatgaagattaaacagcagcgtccggcaaaattctccaccagagaatataaccgctgcagaatttgtggccgtccacacgcatacttgagaaaatatggtatctgccgtatctgtttccgtgaattagcttacaaaggcgagattccgggtgtaagaaaagcaagctggtaggcattgagcactcgacgaggtattatcgagtctagtgcgaaagcccgtcccgaatcttagtgagtccgagccggaggcgacagacgaacttagctgagtggacgtgtggtggaaggataagagtcgacccactcaccgaagtggcaggatgaaattataaggaggcaaaactcacatgacaatgagcgatccaatcgcagatatgcttacgagaatccgtaatgccaatactgctaaacatgatacagttgatgttccgtcttccaagatgaaattagctatcgctgacattcttgtaaaagagggctacatcagaaaatatgacatcgtagaagatggcagtttcaaaacaatccgtatggaattaaaatacggaaaagacaaaaatgagaaaatcatttccggtatcaagagaatttccaaaccaggtcttcgtgtttatgcaaacaaagacgaaatgccgaaagtactcggtggtttaggtgtggctatcatctctaccaaccagggtgttatcactgacagacaggcaagagagctcggcgtaggcggagaagttctggcatttgtttggtaggcattgaacacttaacgaggtgttttcgagtttggtgtgaaagcccgtcccgaaccttagcgagtccgagccgaaggcggcagacgaacttagttgagtggacgtgcgctggtctagaaaaagtagtagaactgaaaacagagaagccgccaatggcttctccgagaatctaagtaggaggtaatcggcatgtcacgtatcggaagaatgccaatcgcggttccggcaggagtaactgttacaatcgcagagaataatttagtgactgtaaaaggtcctaagggtacactcgagagagagttgccagtagaaatgacaatcaaagaagaagatggtcatattatcgttacaagacctaacgacttaaagaagatgaaatctttacacggtctgacaagaaccttaatcagcaacatggttcatggtgttaccgaagggtatgagaaagttctggaagttaacggcgtaggttacagagccgcaaaacagggcaagaaactggttctcagccttggttattcccatccggttgagatggaagatccggaaggcatcgagacagtccttgaaggacagaacaagatcactgtaaaaggtatcagtaaagaaaaagttggccaatacgctgctgaaatcagagacaagagaagacctgagccgtacaagggcaaaggtattaaatatgctgatgaagttatcagacgtaaagttggtaagactggtaagaaataatttaaggagagtgtaaagatggttagcaaacagtcaagaagcgaagttcgcgtaaagaaacacgctagattacgtaatcgttattctggaacagcacagagaccgcgtttagcagtgttcagaagtaataatcatatgtatgctcagattattgacgatacagttggcaatactttagttgcagcttcaacagcagagaaagcaatcaaagcagagcttgaaaagacaaacaacgtagacgcagctgcttacgttggtactgtaatcgcaaagagagcaatcgaaaaaggtattaaagaagttgtctttgacagaggcggattcatatatcacggtaaagttcaggcattagcagatgcagctagagaagctggtctggaattctagtaggaaggagaacatacacatgaaacgtacaaaaattgatgccagccagttcgagttagaagataaggtagtggcaatcaaacgtgtatccaaaactgttaaaggcggacgtacaatgagattctccgcattagtagtagttggtgacaaaaacggacacgttggtgcaggtatgggtaaagccgctgaagttccggaagcaatccgtaaaggaaaagaagctgcagcaagaaacctggtagctgttccatttgatgacaataacagtattccacatgacttcattggaaaattcggaagtgcaaatgtacttctcaagaaggctcctgaaggtacaggtatcatcgcaggaggcccggcacgttccgtactggagcttgcaggatacaagaatatccgtacaaaatccctgggttctaacaacaagaccaacgttgttttagctactcttgcaggattatgcgaaatcaagacacctgaagaagttgcaaaactccgtggtaaatctgtagaagagattctgaactaataggagggtattaaaatggcagagaaattaaaaatcactttagtaaaatctcctatcggtgccgttccgaagcacaaagcaactgttgaagctttaggcttaaagaaattaaacaaaacagttgaaatgccggacaacagcgcggtcagggcatgattcagtgtgtaagacacttggtaaaagttgaagaaatctaaaatccacgtaggaggtgcagtcatggatttatctaatttacagccggctgtaggttcaaaacacagcgacagcttcagaagaggccgtggacacgcttcaggtaatggtaagactgctggtaaaggacacaaaggccagaaagctcgttccggtgcaacaagaccgggatttgaaggcggccagatgcctttatacagacgtatcccgaagagaggattcacaaatagaaactctaaaacaatcattggtatcaatgtaagtgacttagagagatttgacaacggttcagttgttacagtagaaacattaatcgaagcaggtatcgttaaaaacccacgcgatggcgttaaaattcttggtaacggagagctgaccaagaaactcactgtgaaagcagatgctgttagtgaaggagcaaaagccaaaattgaagcagttggcggaacctgcgaggtgatctaatatgttaaaaacactccagaacgcttttaagataaaggaaataagggaaaagcttctctacactttctttatgctggttgtgattcgtctcggttcacagctgccgatcccgggagtagacacaaagttttttgctgaactgttcgcaagacagtccagcgatgcatttggatttttcaatacgattactggcggttcgtttacgaacatgtcagtattcgctttgagcatcacgccatatatcacatcttccattatcatgcagcttttaacgatcgcgattccaaaactggaagagatgcagcgtgaaggcgaggatggaagaaagaaaattgcagaatacacacgttatctgaccgtaggcctcgctctgatgcagtctatagccatgtccgtaggatttggcggaagaggtcttcttatcgacttcaatgcggtcagcgttatcgtggcgattgcgacaatgacatcaggtagtgcaatgcttatgtggattggtgagcggattacggagcgcggcgtaggaaacggaatttccatcgtccttctgttcaacatcatttccacattgccgagtgatatgattaccctgtacgagaggttccttgtcggaaagaacgtgccggtggcgaccgtatccctgattatcattctggcaattatccttgccatggtagtatttgttatcgtactgcaggatggagagcggagaattcccgttcagtattccaagaagatgcagggcaggaagatggtaggcggccagtctacaaatattcctctgaaagtaaatacggcaggtgttatccctgttatttttgcttcttccctgatgtctttcccggtagttattgcagagtttttccaggtggattacgccacattcggcggaaaaatcttaagagctcttaactccggttcctggttccatgcggaatatccggtttattcaattggtatggtggtctatattgctttgatcgtggtgtttgcgtatttctacacatccatcacatttaatccattagaggttgccaacaatatgaagaaatccggcggctttatcccgggcatccgtccaggtaagccaacatctgattacctgaacaacattttaaattatatcgtatttatcggggcctgcggcctgatcgtcgtatgcctgattccgattatggtgtcgggaattttctccgtaggaagcctgtctttcggcggaacatcccttatcattatcgtcggagttgtccttgagacaattaaagcggttgaggcacagatgcttgttcgtaattatagaggatttttaaacgattaaaacaattcgctttctaagcaggagctcctggaggccggacgatccggagccgggctgatcctgcataggggcgtttctgttgaagtcggtgacctgttcgcgtagcgtgcaggttatcgttgtatttgcaggaagcttgtttttgagggtactgaaaagttaccgttatcgttttatcgggaggtaagcctatgaagattattatgttaggagcaccggggccggcaaagggacgcaggccaaaagaattgcagagaaatatcagatcccgcatatctccacaggagatatattcagatcaaatattaaggaaggtaccgaactgggcatgaaggcaaagcagttcatggatcagggacttctggtaccggatgaggttacgattggaatgctgctggatcgcattcaccaggacgactgtgagaagggatacgtactggacggttttccaagaaccattccgcaggcagagagcctgacgaaagcgctttccgataggggagaggctattgactatgcaattgacgtggatgttcccgatgagaatatcgtaaacagaatgtcaggccgccgggcatgtttaacttgcggtgcgacctatcatgtgacgttcgcgcctcctgcaaaagagggcatctgcgatgtatgcggagcagaactggtgctcagggatgacgataagcctgagacggttcagaaacgccttgcagtttaccacgagcagacacagccgctgattgactattataaggaaaaaggcgtgctgcattccgtagacggagcaaaagatatggaagaagttttccaaagcatcactgaaattttaggagcataacagtatggcagtaacgattaaatctcccagagagattgagctgatgagggaggcggggaagatccttgccaaaactcatgacgagcttgcaaagaacctgaagcctggcatgtccacatgggatattgaccatatgggtgaagagatcatacgaagctatgggtgtatcccttcctttaagaattacaacggctaccctgcgtcaatctgtgtatcggtcaatgacgaggtggtacacgggattccgcacagggagcattatctgaaggaaggcgatattgtaagtctggatgcgggagttatctataaaggatatcattccgacgcggccaggacccacggaatcggagaaatcagcggggatgcgcagaaactcatagaagttacaaggcaaagtttctttgaggggattaaatttgccaaacctggcaatcatctaaatgatatttccgcagctatccagaaatatgccgaaagtttcggctatggggtagtaagagacctggtaggtcatggaatcggaactcatctgcatgaggatccggaggtgcccaacttcgccagaagaagaaaaggcattcttctgcagcccggtatgacgctggctgtggaacctatgatcaatgcgggaacttatgatgtagtctggctggatgacgactggaccgtagtgacggatgatggttctctgtcggctcattatgaaaataccattctcattaccgaggatggaccagagattttgtcaatgctctgattcgaggtggtaagatggcaggatatgaaacaggctgtctggcctggtctttggccggtcatgacaaagaaggcatatttatcataataaaagaagatgcggaatatgtttacctggcggacggaagactccggaccgtgggaaaaccgaaacgcaagaagaagaaacacgttcaggcatcccgcatccgcgatgaaaagctttgcgataagcttatgagcggcagcaccgttaccgatgaagagattaaatacttcatcaaacagtacagggcgaatcatttagagacgccggatgaaaaccggtgaaattcacataaccagggaggtataaaagtttatgtcaaaagcagatgtaattgaaattgaaggcgttgtggtggaaaaattaccgaatgccatgtttaaagtggagctggagaacaagcatatcgtacttgcaacaatcagcggaaaactccgcatgaattatatcaggattctgccgggcgacaaggttacgatggagatgtctccatatgatctgtccaagggaagaattatctggagagataaataagctgcagctcagcttacggcgaaactgcggcaaatgatacatggaaacgtcaaaggggactgaacgctgtcccctgagcgggccgggaagagggtagatacatcgagtcttcccgttgggcctgcgctgagtacagcccatagtcctcacattgcgggagaacgggctggcgttgaggcttatgggctgtactcagcatccggacagctatccggtccgccattgcagagcgtgttattgttcgcagcacaccgctttttgcggtgggtgaacagtaacggactgttaccgggattagaaataccgggaaattatgcttgcattatatagaaattagtgttataatgctctagcgaactttgttgaagcaacaggtgagatccgcccttttgccggaacccgggcttttaaaggaaagagacgcctgctgtacctgtaagtccggcatgtaaggactgcaatgggtgttatcaatattgtatgtcctgtgtaaggactgttacggaaaggagaattactgtgaaggttagatcatcggttaaaccaatttgcgaaaagtgcaagatcattaaaagaaaaggcagtatcagagtaatctgtgaaaatccaaagcacaaacaaagacagggctgataagcatttgtctgcctgattttttcgcacggctttctatatgaaccaccaggataagttgttcatagctgctcaggattttcgtccttgaagcatgaattcctgctggtatatggattggcataatacatcattattttaactcaactcaatgaagaaagaaaaaaactaatggaggtgtactacacacatggctcgtatttcaggtgttgatttaccaagagaaaaacgcgtcgagatcggattaacttacatctacggtatcggtagaacaagttcaacccgtattcttgcagaggctggcgttaatcctgacacacgtgttaaggatttaacggatgacgaagtaaagagaatcgctggtgtcatcgctgaaagtcagactgttgaaggtgatttacgtagagaaatcgctatgaacatcaagagacttcaggagattggatgctacagaggaattcgtcatagaaagagcctgcctgtccgtggtcagaagaccaagacaaatgcaagaacacgtaagggtccgagaaagacagtagcaaacaagaagaaataattcatttggtaacaaataagttgtgaatcaggttagtaagtaacaggattcaagtaatcgaagaaagtaggttagtttaaaatggctaaaaaaatgtcaactggtaaaaaagtgacaaaaaagcgtgtaaagaaaaacgttgaacgcggacaggcgcacatccagtcatcttttaataacacgatcgttaccttaacagatgcacagggtaatgcattatcatgggcaagtgcaggcggtctgggatttagaggttcaaggaaatctactccatatgcagctcagatggctgcagaaactgctacaaaggcagctctcatccatggcttaaagtcagtagacgttatggtaaaaggtccgggatcaggccgtgaagcagcaatccgtgcccttcaggcatgtggtcttgaagtaaccagcattaaggacgtaactccggttccgcacaacggatgccgtccgccaaaacgtagaagagtctaattaggaggtgcaagtaaagtggcagtagatagagttcctgtacttaaaagatgtagatctcttgacctggatccgatttatttaggaatcgacaagaaatccaagagagagttaaaaagagccaatagaaagatgagtgaatatggtctgcagttaagagaaaagcagaaagccaaattcatctatggtgtgttagagaaaccttttagaaattattatgcgaaagcttccaaaatgtccggacaggttggtaccaaccttatgatccttctggaatgcaggctggataatgtattattcagaatgggctttggccgtacgagaaaagagacaagacagatcgtagatcacaagcatgtactggttaacggaaaacctgtaaacattccgtcttaccgcgttaaagctggtgacacaatcgagatcaaagagaaatacaaatcttcacagagatataaaaatatcttagaggtaaccgccggaagaatggtaccagcatggttagaggctgatatggaaaacttaaaaggcgttgttaaagagttaccaaccagagacgaaattgatgttcctgtaaatgaagtgcttatcgtcgagttatactccaaataattaagagttgactaaattttttgttgctgtccggcccctcacgggccggacagcggcaaaatcgccggttggcggtaacggacgtgaaccgcgtctttcgccgttacccgcagcgaaagttcttctcttattttataagagtatgacagaccctcaataaaagttcccaaaaggaggggctatagtgttcgattttgaaaaaccgaaaattgaaattgctgagatttcagaagacaaaagatatggcaagtttgtagttgaaccgctcgaaagaggctacggaactactttaggaaattctttaagaagaattatgctctcttctttgcctggcgcagcagtaagtcaagtgaaaatcgatggcgttttgcatgaattcagttcgattcccggagtaaaggaagacgtaactgagattattatgaacatcaagagtttggcaattaagaatctgagcgaaacgaatgagccaaagacagcttatatcgaattcgagggagaaggcgtcgtaacagccgctgatatccaggtggattctgacattgagattttaaatcctgagcaggtaattgccacattaagcggcggcacggacagtaagttctatatggaactgaacatcacaaaaggccgtggttatatcagcgcagacaagaacaagaacgacgagcttccaatcggaatgatcgctgtggattccatctacacaccggtagagcgtgtcaatatgaccgttgagaatacccgtgtgggccaggttaccgactttgataagctgacactggatgtattcacaaacggaactcttgctcctgatgaggcagtcagcctggcagctaaagttctgagcgagcatttgaaccttttcatcgacctttctgagaatgccagaactgcagaagttatggtagagaaggaagacaacgagaaagaaaaagtgcttgagatgaacattgatgaactggagttatccgttcgttcatacaactgtttaaagagagcaggtatcaacaccgtggaggaactgtgcaacaggactccggaagatatgatgaaggtcagaaacctgggccgcaaatctttggaagaggtacttgccaaattaaaagagttaggtttacagctcaatccgagcgaagaagcttaattttaacgaatgtttgagcacccggcagataagaccaaagggcacagccgggcgtttacgaataaagcaggcggacagtaagaccaatgaagcgtggacgccggcttccacaaatatggaggattaaatcatggcaggatatagaaagctgggaaagacttccagccagagaaaagcattactgagaaaccaggttaccaatctgttataccacggcaagatcgttacaactgaggccagagccaaagaagtaaagaagattgctgagggcttaattgccatggcagttaaggaaaaagacaacttcgagaccgtaaaagttactgcaaaggttgcacgtaaagataaagacggcaagagagtaaaagaagttgttgacggaaagaaagttaccgtctatgacgaagtagagaaagagatcaagaaagacaaaccatccagacttcatgctagaagacagatgttaaaggttctctatgatgtaacagaagttccggctgcaaaagcaggcagaaagaaaaacacaaaagaagtagatatgccggcaaaactctttgatgagattgctcctaaatacgtaaaccgcaacggtggatacacaagaatcgttaagatcggacagcgtaagggcgacggcgctttggaagttttattagagcttgtttaatcagtaaacaaagcggtgaaacgtttgctttgtaaacatttcactgcccgttaataaacgactccagccatgcagagtggctggagtcgttttaatttacggcggtgacgtgtgcgcggagcgtgcaggttattaacggtcctcagctttccttgccggacggtaaagtctgcatgagggcaaagaaatgttcaggcttaccggtggtgaaatatgcataccaggattccagcgtgtccggctgaaaaacgtttaaatgcccaataatctgtttcgcccacagcaaagctccggcagagctggcggtaattaggttgttatccgccacagagggcttgtcaatgtaaaaatcctggcctttataaccgggagaaaacatttcaagaaatcccggcccgttgctggtatgggggcggttatccagcagtccggctccggcaagcgcagcggtagccccgcagatggcacacaccaaagcgcctgacgagagaagctcttctgcttttttaataacagccccgtgctttaaatcattccatgtgtctgcgcccggtaatagcagaacgcttgtctcactcacagcaatatcatcaatcaggcagtcgggcatgattgtcagaccgcccattgtcttgattggcttcccggaataactgacggttttgagcgatacgcgctgagcgtcctttttgaaaaaccggccggaattcacctctgaaataacatagccaagctcccagtcggccaaagcatcaagaacgtaaacatagattgtgaacataagtttcctccattttcatattatttccacctgacaggcagttgatttgcctgcctttttattatactctgcaattgttgacaactgtatggcaacaatctataatgataaaaaaattggaaggtgcccgacagatgaaagttgacaggcttgttagcataattatgatactccttgataaaaagcgcataggcgcgcaggaactggcggatatgtttgaagtttccccccgcacaatctaccgcgacatagaggcgatcaacatggcgggtattcctgtccgggggcatccggggtgggcggcggctttgaaatcatgcaggattacaagcttgataaaaaggttttttcgacttccgagctttccgccctcctaatggggctttccagtctttccggtatgatacggggggacgaactggtacatgcccttgcaaaagtcaaaagttttatccctgccgacagagcgaaagacattgaattaaaagtaaaccagatatgtattgatttaaatccgtggatgggtaacaggaatatgcagccatatttggaaattattaaaacagctttacaggaaagcaggctgctttcatttgagtatattgacagatacggaaatttttctaaacggacagccgagccgtaccagctcatattaaaaagtaatcactggtattggcaggggtattgccataaaagaaatgattaccgtttattcagattatcccgtatatcaaacctggaaatgctggaagaagcttttacaccgcgggattatcaaaaaccccagttggattttactggtatttatacaaccatgcagataaaaatcaaaattcgtattcataaatctgtcatggacagggtacttgatttttgttcgtatgatcattttactccggatggtgacgagcattacattgtcactctccccttcatagagaatgaatactattacaatattcttttaagctttggggataaatgcgagtgtttggggccggtacatgtctgcagggagatgaagcgccggatccataacatagcggctttatatgagaaatggaattagaagtatttcttttttatccatctatgccgcaagaatatcgtaagttgactgtaatagtggaacgctttataattaaattataaaaacagcggaaaaaacatcaagaaaaatgttttccgccggagaggatgagggatatgaagagaaaaaacaggtggattggtccgcttgtttctatatgcctggtgacctgtatggcgtttggaggggcaatggtttcctatgccgcttcgtccagaaagacaatcagcaaggtaacgattaatctggacctggaattggaagcgggcgagagcctgccggatctggaagcgggaaaagacagcgggtttaatgtaagggcaggaaacgagcggtatacggcaactgaggcgcagtgggtgagctccacatcgaaggatgtgaagattggcagcacctatacgttaaaagtgtggctggaagcggaggatccggattcctacggctttgtcgggacctataaatccagcaatgtcacggtaaaaggcggcacctttgtgtcggcttccagaaagggatacgatactctggtagtcacggttaagacgaagccggtaaagggcgaatatgacgcccctgaggacgccgaatggaaagagaatcagctgggccacgcgaagtgggataaagtgaacggagtggacgcctatgatataaacctttataaaggcagcagcgccatatataaggtgaaggcgtacaagggcacgtcgatcaatttttatccatacatgacgagtgcgggtacttatacctttaaggtgcgttccgcaccgtcgggcgacagccagaaggactacgccgacagcagcgactggacggagtcggatgagctgtatattgccaaggaatcggtgtccaatggttccggcaagattgattacaacaatacaaacagcgctgccaataattccacgtcgcaggtcggctggatccaggatgggagccgctggtggtaccgctatccggacggaaccttccagaaggattcctggctgctggtcaacaatatctggtatctgtttgacaaagacggctggatgctgacgggatggcaggagaagaacggaaactggtattatctggacaacaacggagcaatgagaaagggctgggtacaggcggccaacggctggtattatctgaatccgggacctgagggcacagagggagcgatgtttaagaaccagtggctggacagcaacggcaagagatattatctgggagaaaacggcgtaatgtgcgagggctggacccaggtgggaggaaactggtattatttctatccgagtgacggaagcatggctgttaacacgactatcagcacattttatgtaggtgccgacggtgtgtggcgccggtaaggagcagcggcataaattctagaaaagtgaggtagtggtatgtttgggagaagaacacggggcttatggatctgcatagcggcggcaatgctcatagcgggcagcgcctttacagcatatgcggatacgacgattgccaatatcagagtgacatttaaaaataattatgataaagaggaaggtaagattctggagccaaccgtgactacaggaagcggctgcgaggtggaggatatttcctggagcaaggctctggagaaatggaatccgggttccaaaataacggcttcggttacactggttcccggcagcgggaaagcttttgcgagttcctactcttctaaaaagactaccataagcggagcggattttgtctctgccaaacggaatgaagacggcaacctggtggtaaaggtaaactattatccggtagttcagcttggacagacggagaaagccggctggagtgattcgacaaggacaaaagcagtctggaaaaaggtcccatatgcaaccgcatatcagctccgcctctaccggggagacgatgagtatgtgactacgctgacgctggagggtacgaatgttgacctgacggagtatatcacaaaagaggccaactatttctatgaagtcagagcaacctcgaagaacagcacagatgccggctacagaagaaccggagattatgtaacctccgaggattcatttgtagacaacctgggtgaggtagggggacgctggcgccaggatcgcacgggctaccgctatacggatgaaaacggagtggaagccaacaatggctggcgttatattcagggtacatggtattattttgatgagaacggttatgcagccacaggctggcgcttaatcaatggaaaatggtactatatgaattcggaatgtaaaatgcagaccggctggctgaacctgaatgacaagtggtactatacggattcaacgggcgctatggcagtcggctggtatcagatttcgccgtcggagtggtattatttctatgaagacggaagcatggcggtgaatacggtgatagacggatacacgataggcggagacggaaagatgcagtaaggcgcgggatagaagtagagctgttgtgaaggcggtatgcagactgccatcacaacagctctattctgttgatgacggtgacctgtgcgcggagcgtgcaggtcaccgttttataatgaacggaaataatctaaaaaagccattgcagacttattcagataatggtcatatgcccagattgccatgggacttgtataaagacaatcgtcatccaatattttctgtacaattttttcctgggccatctgtgtcgctcccgaaggcagaagggcaattccgagtccggattctgccgcacgcaaagcggatgaagaacgctccgctttacatataatcctgggcaggacattatgtaaattaaatacttcatttaagattgattcataacggcggtatataatcaactgttttccatccagttcatcgacggagcagcttacacagtcagaccagttatattccggagacatgaccgcaaccataggctcaggctcttttttcaaatatttgataccctgaagatggaagggggaacggataatgccaatatcgatgatgcctttttgcaccaaatcatggatataagcgctatttccctcaaaaaattcaaaattaatcatcggataattctgatgaaattccgctattttaggcgataatacaagcggtactgcggtaggggttatgccaatgtataaatttcccttataaccgctggaaaaatccacaatttctttttgtatcacgttacttagagcaagaagctgcctggcacggtctgcaaacatctggcctacggctgtcagctgtaaattacgggaatcacgttcgaataaaacaacattaaattctttctccagcttttttaactgctggctaagcggcggctgcgtgacgtgcagcctggcggctgcggcagtaatagagccttcttctacaattgttaaaaaatactgtaactgctttagatccatataaatcccccatttatacaagaaatgaataaatcctattttttatcaatattttacatgacaatagtgtgatgttacaatgaattcatagttaaatattgtttagtgcacataaataatcttaacataaccggtgacctgtgtctatgcctgacggattcggaagaagcgcgctccccttttggcatacccgcggccacatggctgaaattttattaataataagtctaagaaggagaaggttatgattaatagggaacaatgcggccaatttatagacgcaaatacggataatatggtgaaagactggaagcggttggtagaaatagaaacgggctcttttgataaagagggacttgaggaggcagccgatacacttaaggcaatgtttgagggcatcgggtttaggtgtgacctgattgatacaggggctgcggggaagacattaacagggatattaggcagggagagggaaggaaagccgattttattttccggacattatgatacggtttttccaaagggaacactggcagacaatccattccgtatcgaaaacggaagggcatatggaccgggcgtcctggatatgaaagggggcattataatagcatattatgttattaaggcgttgaacagcctgggttttacagagcgtccgattaaaatattatttgccggtgatgaagaaattgcccatgaaaattctacaactgcagaaacgctggtggaagaagctaaaaactgtgaatttgcttttaatatggaaacagggcttccggacggttcgctgtgtgttggacgaaaaggcggaataactatatcggcggaagtcaccggggtagaagctcatgccggaaacagttttgagacaggcaggaatgcaatcgaagagatggcatataaaatttgcaggctacgtgagataacaaatttatcggagggaataactgtcagtgtaggaaccataaaaggaggcacagtttctaactccattccaggcagctgccgtattgagatagacgcacggtttataaagccgtcccaaatggaaaaactggaacatgacctctatgctgccctcgatgagactcatataccgggtacacaaactacatacaaggttttaagcattattaatgcatttgaaacgaccaattctgttaaaaagctctttgatttttgcagtcaggcacttcaggactgcggggaagaaccgttgaagtcaaccgtactgggcggaaactcagatgcagcatacatcaatatagccgggacaccggtcatctgttcctgcggcgtgattggacagggaaatcatacggggaaagagtttgcaatagtagctacgatggctgaaagagcaaaaatgcttttaagtattctgagccggctggacagctataagggggaggccgaataatgagaaaagaagaaaaaaacagagagcaggagcaccgtatagggataaaaggctggggctcgttattcttgcttattatccttttttccgggatatttactaattccgggaactttttaaaggcttttgatttaagcaatctgattggaagctttggaatcattgccgatggtctgaattttgaaggacagggaggagtcggagcgagagaggggttcatgtttgcattgacactgattcccacaacctgtgtttcggtaggatttgtacatgtttgtgaagatatgggggccatggaagcagcacgaaagttttttacacctctactcagacctttgatgggaattcccggaaccagcgggattgctttcgtagcgtccttcaccagttctgatgttgcgtcttttatgacgaaaaaagcatatcagcagggggagataaccgatagggaaaggacaatattcgtggcttatcaatatgcggcttcggctgttattattaacacgatttccacgcaggctccgctgctcccgatcattaagctcgcggtaggtcctgtaatcgtatatttgtggatatttaaagttctgggagctaatattatgcggctggtagtaaaaaaagaagcagaaggaggtgctgtttagatgagcgaagaaattaaaacagaagaggccggcactgataataatcaggaagagaaaaaacagaaaaagtcgatagttacctctttcatggatggggctaaggaagggttctatatcgggattgaaaatatattaccggctatggtattgggctacgttataatcaggttcctggaacttacgggcctcgtaaatctgattggaaaggtatttgctccggtaatgggaatatttggcctgccgggagaggcggcaattgtgttaatgtcggcgttttttgcaaaagcggcgggagcggctacggcggcgaatttatatgcggccggaacaattaatgcggctcaggcaacgattctggttgtaccctgtatgctgatgggaacgttagtaggacattatgcaagaattgttcttgtagcagggacaaatccgaaatacaggtcgcatcttttggggctgccgattcttctcagcctggtgggaatgcttgggatgcgcggaatcatgatgcttatggggtatatgtaagctgttttatatcagtaaacggagctgccggttttgactaaggcggccccgttctgcttccgctctctgctgcaggagcaggctgttgataattttgaaagaaggggaagatatgtacaagaaaaaggggaaaaccgtaccgaaacgggtaaaagctattaatccgatgctcatactggttgcatttctggtaattgcggcaattgcgacttatttggtgccggcaggctcatttgaccgttttgaaaatgagataacaggctattcgatagtagatccggacagttaccgtcatgtggcgcagaatccgataaaaatatttgattttttcatggcggttcctaatgggcttgccagctccgggaacttaattttctttattttaattgtaggcggggctctgcaggttattcaggcgacgggggcgatagatataggcctgaaaaatttaattaagaaatttgcaggaaaagaaaatctgcttttgattgccattctcctgacatttggcctgctgtcctgctttgccgccaccagtgaggaatttctggcatttatgccgctgatatatatggtttgcctgggacttggatttgactctctgattgctgcattcctggtacttggctcatcctccatcgggtactgcggcggcatgacgaatgcatatacggtcggtgtatcccagacgattgccgagcttcccatgttttcgggaatcggctacagggcggttgctttcattgtatttgaaattgtcagcatgatatggctttgcacctatgcaaataaaatccgtaaaaatccggagaaaagcctgatgtatgaaattgacagccagtaccggacagctcttgatttatccgatattccgcctatgactatgcggcacaagctggtgctgctgacatttattcttggaatcgtatcgatggtgtgggggattcttaccaggggattttatcttacagaaatgggagcggtgtttatgattatgacagtgacggccggagtggtcggcggcctgaacggaaatcagatatgcaatgaatttgtggaaggaacgaaaagtcttttatgggttggtcttgttatggggctttgtaaaggagtgacgaatatccttacggaagcaaacatcattgatacaataattaatgccctggcaagcctgcttcacggccttccccgtacagttgccgcctgtgctatgtttgccgtccaggatgtaatcaatttcgtaattccctccggctcgggacaagctgcggttacgatgccgttaatgataccgctgggagacttgctggggataaaccgccaggtgaatgtactggcttttcagttcggtgattcgctgtcaaatatggttacaccggctggagcaaagctgatggccggcattgccatgtgcaatataccttataagaagtggctgaagttttttttaccctgttttgcgctgtggtggattatttcctttattcttttaacgatagcaaccttgattaattacggccctttttaaatgaaaggaggtgaaatttaccccaaatacataatcccttttaaaagaccgatccggtatctgccggaccggttttttattgcccggctgccgcagtttctgccgctgccgggaaccgatattttggatgggatttttagaaacaaaatactacttgactccggggtacaattgctctacaatttacacaaatatgcagtgataagctgcggttatgaagggcttgaatatgaatataattaaagcggcaaatctcgtttttgactatatcagacgggacgaagaagataaagtggaagaagtaaaccgtgcgattgatcatgtggatgtggagattgagaaggggagttttgtggccgtactgggacacaatggctccggaaagtccacatttgcaaagcatatcaatggcattttaattccgacggaaggaacggtctgggtatctgagatggatacggcggacgacgatctgctgtgggaagtgagaaagactgccgggatggtgttccaaaatccggataaccagattatcggcaacgtagttgaggaggatgtggggttcgggccggagaatatcgcagtccctaccgaggagatttgggaacgggtggataagagccttcaggctgttgggatgacggcgtacaggaagaagtccccaaaccgtttgtcgggaggtcagaagcagagggtggcgatcgccggcgtgatggcgatgaaaccccagtgtatcgttctggatgaaccgaccgccatgctcgatccgaacggccgcaaggatgttatcaaaaccgttcaggagctgaaccgggctgaggggatcaccatacttttgattactcattacatggaggaagtgatagacgcagaccgcgtgatcgttatggacggcggtaaagtggttatggatgggacgccaaaagagattttttcaagggtggacgagcttaagagctaccgtctggacgttccccaggtgacggaactggcctacgggttaaaaaagggcggagccatgctgccggatggaatactcaggaaagaagagctgatggaagcgctgcttccgctcttaaaagaggaataagatatgtcaatcaaggttatagatttgaattacacatatggggcggggactgcctttgagcagcatgcccttaagcatgtgaattttgagataaatgacggtgaatttgtcggtctgatcggccataccggttccggcaaatctactttaatccagcacctgaacggcctgatccggcctacgggcggagatatcctgtatcacgggaccagcatatacagcgacggttataagatgaaggagctgcgcagcaaggtcggtcttgtatttcagtacccggagcatcagctttttgaagctgatgtattttccgatgtctgctttggaccgaagaacctgggctgttctaaggaagagaccgagaagagggcgcgccatgccctggatctggtgggaatggatgagagcttctatgaacagtcgccatttgaattgtcgggcgggcagaaaagaagggtggcgatagcgggagtccttgcgatgcggcctgagatgatgatactggatgagcctacggccggtctggatccccagggccgggatgagatcctggatcagattgagcggctgaaccgccggtacggccttaccattctccttgtctcccacagtatggaggatgtggcccgctatgttgaccggattatggttatgaaccacggggagaaggtctttgacgataccccgaaggaagtatttaaacattataaggaactggaagacatgggactggcggcgcctcagattacctatgtggtccaggagctgcgggagcatgggatccctgtggatgatacaattacgaccgtggaagaggcaagggatgcgattcttaacctccttcgggaaaaggggaggctcacattatgattagggatattacaatcggacagtactatccggtagattcaccgatccaccgcctggatccgagaacgaagctgtttggtacgatgatatacattatttcactgttttttgccgataatctgtggtgctacctgattgccacactgtttttgaccctggtagtcagactttcgaaggtgcctttcaaattcattgtgaaggggctgaaagcaattgttttcctgctgcttatcagcgtcagctttaacctgtttctgacggacggccgggagattttccggctcggatttctgaaaatcacggccgagggcctgagtctggccttttttatgggcctgcgtctgatgtacctggtgcttggctcatcgatcatgacgctgacgacgacgccgaaccagcttacggacggcctggaaaagagcctcggatttatgaacaggcttcatgtgccggttcatgaggtctcaatgatgatgtcgattgcgctgcgttttattccgattctgattgaggagacggacaagattatgaaggcccagatggcaaggggagccgactttgagacgggcaacctgatgcagagagcgaagagcatgataccgcttcttgttccgctgtttgtctccgccttccgccgtgcaaccgatcttgcgatggcaatggaagccagatgttacaggggcggtgcgggaagaacgaagatgaagcctctgcactatgagaagagggacagggcggcttatgccgtatttattatctatctggctgctgttatcgcggtccgcattattatgtagaaccatgccgggagaagaatagaatgaaacgtataaaactgactgtggcatatgatggcacggcctactgcggctggcagatacagcccaatggcgtgacaatcgaggaagtgctcaacaaggctttaacagggcttctgaaggagcctgttaccgtaatcggggccagccgtaccgactccggcgtacatgcgagggggaatgtggctgtctttgatacggagagcagaataccgggggataagatttgctttgcattaaaccagcgcctgccggacgatatccgtgtccaggcatcggaagaggttcctctcacattccatccgagaaaagtcaattgcacaaaaacgtatgaatacaagatactgaacagaaaaatcagcatgccgctggaacgactttacagccacttctgttatttcaacctggacgtggaaaagatgaagcaggcagcggcttttttagtgggcgaacatgatttcaaaagcttttgcactgtccgcacccaggcagaggagacggtcaggacgatctacagccttgatgtctcaaaggatggggatatgattacgattcggatcagtggaagcggttttctctataatatggtgcggattattaccggaacccttgtgaaggtcggtctcggcgtatatcctccggagcatatggaagagatactggaggccagggaccggtcggcagcagggccgaccataccggcgatcggtcttacgcttgtaagcctggaatatgaaaaggagcttcgtccgtttttggaggggcagaacaggcactggcattacgtactggatcagagggaggcaggagacggaggccccgcccggctgacggtttaccgctgcggggaggaagagtttgagaggcttgtgaaacgtgtcgtacatcaggcttaccggaatggagccgggagcgttatcgtgacggacgcggaaaaagacaggttccgggccggagaccgttatggattttataaagttgtgaagaatgggaccgggttccaaatggaggatgccggaccggaatagaatttcgtcggaaaaacgggggaaaaatgagtaaaacatttgtgtatctggtttattttggcgtatattcgctggcaattttatttattggaaagtcttccttcggggagagtgattctatctccaaattctttgtcggagagagaaaaatcgggctttgccgcctgttttttacttttgtgggaacctggatttcagcggccacaattctcgggtataccggaaatgtctatcagaacggggtggctgtaatttccatgtcggtaattccgtggtttatcggggcgctgatgctgtatgcaatcagcaaccggctttatgacaacgatatccttacgattccacagctgattcggaaccgttatggctcccggggccttcagattgcctccgccctgctgatgtcatgcggttatgtgctttaccttgtcatgcagattaaaggatttggcattgccgcttccaatctgcttaatattgattataaggtagcggtttttctggtctatctctttatattatattccacgttcggcggctttaactcggttatcaagacagatacctgtaatctggtgatgctggcgctcagcgtaggcgtgatttattttgttatagtcgggaaagtggaaggcacatggcttttatcggacagcactgtggcgagagaaacactgaaagccggagtggcggtggagaacccgggattgttccgggactattccccccttatgtatatctccatgtttttcggctggggcatgggactggcgacaaatccccagtacatgatccggattgtcgctgcaaaagataaaaagacggctagaaaaatgctgctgtgtgcgattgtttttctggctctgttctattttgcccttactcagatagggctggggcttaaaattctttttccgcgtcttgacacctttcatgatacggatgatatttttgtttatgcggtaaactatctgcttcaaagcagattcagcggtttttttctgatcagcgtaatcggagcgtgcctttctacggccaattcgcagcttttgctgataggctccatgctgtcttatgatgtggcggggcagttcgggaagaatgggatgaaggaggacaagctgctggggcgcgccaagtggtttatattcatcggaggtaccctggctctaatattgtccctgaatccccctgaggatatcctctttttcggcgccgatatatggggagtttttgcagtgatttttacgcctttaatctacggggctctgttatatccgagaggaacaaaggccggggcctacggttcatttatcgtgggcataatctgtgcggctctgttatggggcaggaccaccagggtatactgggccttcccggccacagcctgttctgttctggcataccttgtaattccgtttttccagaggaaaacaggcgctaaagggtaacagatcagacaggtctgcgcgtttgctgcgcggaccgtgcgaaaaggtagtggaagcgagcatccggctcatcgcgcagcgattttattagccggatgcagtaacagttccttgtcggaactgttacgctgaaggggaaaagggggctgaagaatgaaaaagttgaccgacaggctgtcaaaatggttttttcagatagagaacgaaatcctggtcccgtttttatttgtcggaattgtcgtaatctgtggttttggggtaatctcctattacaacggttacacgatgcagagagataaccagaaaaccctggccgtctacatgtttgaggaaataaacagggatgttgagtatttgtccggccgtctgagcgagaaggagctgaaagataaatacaggtattatgggagaggctatgtccggattacggataaggacggtcaggttattacttatgaagacggctctgttcaggataagacggtatttttaacgaatgagggcgcgaacaagctgggatggaaactggaatttctgatagacgaaaatttgtttgaggaagaaattctggaaaaacagaattatgtcgtcatcggggccatcgcatcccttcttatcatcatacaggccagtatttttatttcccataacattacaaggccaatccgcagtatgagcagtacgtgccgggaaataaacaaaaataagggaaactacaggagctaccggttcgaatcggtgaaaagaaaagacgaaataggccagctggctgttacatttgagagcctgctacgtaacatggataactacactaagatggagtataccagcaaaatgtcggcgacgcttgcccatgagataaaaaacccgattgcagggatacgttcagggatacagcttttaaagggaagagcagccaaagaaagtgacaaaatgctatgcgagagcatgattaaagaggttgacagagtgaccactctgattatgaatctttttactctttccgtaaagaaggaatccccaaaggaattgatatcctttgaaaaagtcattggtgagattgcgatgatttattccaagggggcggagggacagggagtcgtgatggaaaccgcggtggaggaaggactgacgggctatctgaatgagaatgaattccgccagattgcccacaacctgatcagcaacagcattaaatcggttattcccggcattgaggggagaatcaggatatcgggaagagagagcgggaacaaggctctgattgagtttcaggacaacggaaaagggatgtcgcgggaagaactgacgcgcgccatggagccgttctacacaaagagcattaacggaattggaattggtcttgctattgtaaagaagctggtggaacaaaacggcggcctgatggagatggccagtgcctgcggggaggggacctgcgtaaggctgacattttacaggagggtggaagattatgaagaaaatattagtcgtggatgatgaatttctgatccgttacacactggaggaagggctgaaggacaggggatatgacgccaaatcggccgggaccatagaggaggccgtagagtgtgtaaagaaattccacccgaatgtcgtgatcctggataatcttctggagcatagcgtgggtatggatgagattgccaccttcaaaaatatggatgaggatatccaggtcattttgatgacggcctacggctccgtatcccaggcagtggaggcgaccaaaagaggggcctacgattatgttctgaaaccgtttgatgtggatgaaatcgattttattataaaaagatgtctggagcagatgaagcgccgtgattctctggaatttttgaagggaaaatcccaggattttaccggaatcagtgaggctgtctgccagatccgctcccagatcaaggtgctgggtgaaaattcctctgtcaatgtcctgatcaggggggaaacggggaccggaaaagaggtggtggccagacagattcatgactgcagtgacaggagagaaaatctgatggtcagaatcaactgcggggcaatccctgaaaatctcctggaaagtgagctgttcggttacgagaagggcgcatttgcgggagcgctgaagacgaagaaagggctgatagagctggctaacggcggaaccgtcttcctggatgaaatcggagaactgcctcttgccatgcagacaaagcttttgacttttctggacgaccggaaatacaaacgaatcggcggtctggaagatatcgagctggatgtacgggtgattgccgcgaccaaccggaatctggagagggcgattgcgcagggccagttccgtgaggatttgttctaccgcctcaatgtgatgcagattgtaattcctccgctccgggagcggcgggaagatatccctgcactttgtgattactatctggactactataataaatcctttgccaaaaacattgagagggtagagccggattttatgagggagctgattttatatgactggaaggggaacgtccgggagcttaagaatatctttgaacgctgcttcctgttcagccaggggaatgtcctggagaagcacgtagaactgacgccggttgagaaaacggagaccggcggacatgggaactgttattatctgaaagatttggagaaaggtccaatcagtctcgaacaggaggttttagtgctggaaaaattatatatgaatcaggcgctcaaaatcagtaataataatctgaccaaagccgccgctctcctgggaacgacccgtttttctatcaagaggaagatggagagggaggaataaagagcggtgaaccataaaccgtgcaaaaagtcacatcgtgcaaaaacgcacgcaaaaatcgtgcgtttttgcacgatttttgcgttaattagccataaaaataaaaataatcgaaataaatattgaaaaaaatattaaagtcagataaaatagtactgtcagaactacatatggttcgaggggcaaataaacagtgaaggtaaggaggaaaagactatgtattatgtggatttgaacagtgatttgggagagagcttcggcaattatacgatcggtatggatgcggaaattctcaagtatgtatcatccgcaaacgttgcatgcggctggcacgcaggcgatccgattgtaatggaaaagacggttgccgttgctaaggataacggcgttgccgtaggcgcacatcccggatttcctgatttgatgggattcggaagaaggaatatggtagttactccggaggaagcaaaggcgtatgtgaagtatcagctgggggctttaaaagcatttacagacagccacggtgtgaaaattcagcatgtaaaaccgcacggggctctctataatatggcggcagtcgatgaaaagctggcgaaggcaatgtgcgaggcggtttatgaagtagataaggatatcattttcatgggactggcaggctcaaagatgattgaagcggccgaagcggccggccttaaggcagccagcgaggtatttgcagacagggcatataatgacgacggaactctggtatccaggaaactggaaggttcggttatcaaggataaagacctggctattaaacgcgtagtcagaatggtaaaagaaggaaaagtggagagcattaacggaaacgacattaatatcaaggctgattccatctgtgttcacggtgacaatccaaaagctcttgagtttgtaaaaaatatccgcgaaactctgatcgcggagggtgtaagtattaaaaatctgttttaatgggaatgggaaaaccttagacagtattcacaatgaaggagatatatatgggagagaagaaaaagaataatatgacggtccttttgggagcagcgttcctgatggcgacatcggctatcggacccggctttctgacacagacagccacttttacaggccagtacggttcaatttttgcaatggttatcatctgcaccatccttctggatgtcacgacgcagttaaacatctggtcgattatcggtgtgtccggtatgcgcggccaggatattgccaacaaggttctgccgggactcggttattttatcgcgtttctggttgccctcggcggcctggtatttaatattggaaacgtgggcggagccgccacgggactgaacgtaatgttcggacttccggtcaaggccggcacgattatcggcggagccatcggcatcctgattttcctgtccaaggatgccaaatccggtatggataagatgacaaagtatctgggaagcattatgattcttgtggtactctttgtggcattcaaatcaaagcccccggttggcgaggcagtgacaagcgtcttcaagttttcagaagctccgggactggtattcccgatgattacactgctcggcggaagctgcggcggatatattactttctccggcgcccaccgtcttctcgacgcaggcttttcagggaccaaggatcttccggaagtgcgcagatccgttcttatgggaattactgtgtcaggcaccatgagaatcttattattccttgctgttctgggcgttgttacggctatgccgcaagttgtgggaagcgatgcatgggtagccagtcctcccgcggcagcattccaggcaggcgcaggcgtgatcggctataagattttcggccttgttattttctttgcggcatgtacctctattatcggtgcggcttatacttccgtttccttcttaaagacactgcatccatttatcatggaaaatgaaaaatggttcgttatcggatttattgccgtttctaccgtaattatgactttattaggccagcctgcaactctgctggtactggcaggttccgtaaacggcctgattcttcctctgactcttctgaccatccttctggccagcaggagaaaagatattgtgggagaaaattataagcacccgatggttctgattgttctgggacttggcgttgtacttctgacaggatattcaggtatcatggcgcttccgaagattctgaccatctttggataatgaattgacagtaaattagtggtaacaagcctgtacagcggcttgttaccgttttggaggaaaaaatatgagcgaagtaagataccttgtatcaggcgactgctccgtgtgtgttgaattcggcaatgaaatcagtcctgaaatcaataagaaaatcagggcgtttaaaatcgccgttgaaaaaagcggaatcgaagggatagtcgagaccgttccaacgtaccgttctctgcttgtctattataaacctgagattatcagtttcagggaaatctcggaaaagttcgaagagcttatgggttcccttgataatatcgaaatcccgccgccaacggtaattgaaattccggttctttatggcggggagatgggacctgatatccagaacgtggccgaacataacggtaagacggtggaagaggttattcagattcacacatcggaagaatatctgatttatatgattggctttatagccggtttcccgtatctgggaggaatgagcaaagagattgccaccccgaggttaaaaagccccagggttaaaatcgacggcggttcggtgggaattgccggcgagcagaccggtgtctacccggttgactccccggaggctggcagttaatcggaagaacaccgttaaagctttatgatgcagagcgtgagaaaccggtgcttctggaagccggacagtacataaagtttaagtccgttaccccggaagaatacgacgcaattctgaaggctgtggaagacggcagctaccgttacgttgtatatgacaaggaggtgtaacgatgggcattaaatttttaaatggggggttcctcacgacaatccaggacatgggacgcacaggctatcaggagtccggcatgtccgtatccggcgtcatggatcagcgctctgcggcactggccaacatccttgtcgggaatgatgaaaatgaaggcgtcatggaggttaccctgatggggccgatggcggagtttacagcagacaatatcattgccgtcacaggggccaatctcggggcgaagttaaacggcaaggaactgccgatgtaccaggcggtacaggtgcacaagggcgattccttaagctttgccggcatgttcagcggcagcagggcctatgtggcatttgcaggagggctggatatcccggtcatcatgggaagcaagtccacaaacctgaaatccagggtaggcggctatgaaggaagaaaactgggtgcaggagatgagattgcctttacggcgccgaaaaccactcttcccaatatgcacctgagaaaaattaaacccgatgattttaccgccacggaacaggttctgcgggtggtaatgggtccccaggatgattactttacagagaagggactcgacacattcctgagcgcaacgtatacgttcaccaatgagtcggaccgcatgggctgccggtgcgagggcgaagtgattgagcataaaaacggcggcgatattattaccgatggaattgcttttggagcaatccaggttccgtctcacggacagccaatcattatgatggcagaccaccagacaacaggcggttatacaaagattgcaagcgttatttccgtggatcttcccaaggtggcccagtccaggccgggatataaggtaaaattccgtaaggtttccatcgaggaggcacaggaattacacatcgcacaggtggaagaattcaaggcattaaaagagaagttatcaaaagcgccggagcctgccgctgagcgggatgcggttatccaggcggcggtcgcccacgaggcgtccaagtactggggaagcgccggaacgtataaggttcggattgacggagaggaatttattgtcgagcttcaggaagagagaacagggctgcgctagggacacctatttaaaatcaaacagggaggtagatacccatgaaagactacagcaagacgtcaccggaagagatctggaagctgatacgttccggagaaattgattacccgacggcaggaatgtgcgcgggatacgcacaggccaacctggttattctgccgaaaaaatatgcggaagattttaaagaatttgccagaaagaatccgaaaccatgtccgatcctggaagtggtggaaggaactccggatgttcatgatatgggagaaggctctaatatcgtaacggacatcccaagatatttcatctacagagacggagtcaggacggaagaggtgaccgatgcatcttcctactgggaggatgattttaccgggttcctgattggctgcagcttctcctttgaggaagcgctcatgagggccggaattgaagtgcgccatattgcgatgggctgcaatgtgcccatgtacaagacgaacatcgcctgtgagagcgcaggggtatttgaaggaccgatggtagtcagcatgcgtccgatgacacctgagaatgcagagaaggccaaagaaatcaccgataagtacccgaatgtccacggaggcccggtgcagataggcaatcctgaggcgatcggaatcatggatatcaacaagcctgattacggtgacagcgttgaaatccgcgagggagagattcccgtattctgggcttgcggcgttactccgcaggcggcaatcgagaatgcgaagctgccccttgtaattacccatgctccgggacatatgtttatcacaaatgtcctgaatacggagttgaatgatttcctggaggcgaagaaacaaaaataaatacggccttattaaatttattaaatcatataaggaaaaaaagttcattacaaaacaagcggcgggaaaaggagagatgttccggggaggaagctctccttttctctgtaaaaagcttgacaggatctgctgccgcaggtagagtgtaggagaaagaaaggcgtatggacacaggcaggaaagcaggtatgatgaacaggcagttagatgaaaagatattcattgaagtaaacggaatcaggcaggggatgtttttgcagagtgaaaacaccgaaaatccggtcctgctgtacctccatggaggacccgggtcaccggagatagcattcactcaggattacccgacggggctggaacagttatttactgtctgctggtgggaacagcggggcagcggtatctcctacagccggaaggttacaaaagaaaccatgacaatcgggcagatgatagaggatgcgacagcggtgacgaattatctgcgccggaggttcgggaaggaaaaaatatatgttttaggtcattcctggggttccgtgctgggagtgcttacggttcagaaatcaccggaactgttccatggctatatcggaattggtcaggttgtttgccagtcaaaatccgagtgtcttgcctattcctttatggtaaatgagtttactgccgcaggcgacaggaagatgctgcgcagattagagaagttcccaatcgacagaggaggcgaggtaagctttcagtatctcgcggtgcggagcgtggggatgatgaaactcgggatcgggattatgcatcatctggactccatgagtgattgtattaaaatagtgctgcgctataaagggtacactttgaaagataagcttcacttcgtcatgggaagcggtctggcgctcaaatgtctgtgggactttgtgatgcagaccgattttgtaaaacaggttccccatctggagattccggtctacatttttcagggccggtttgattaccaggtatcctacagccttgcaaaagagtttgcagacacggtaaaagcgccggtgaaaggtttttatacctttgaaaattcggctcacagtccctgctttgaagagccgaaaaagatgtgccatattatccgggaagacgtgctgcagggaaaatgcggtttggcggatggataaaacttgaaatgtcgcagaaaaccttattttataaggaaaaagtggttgacacgtccggcagagtgtaatataatgtataactgtgacatcaggagaaagcgtctgtaccaatgccccggaacagacatttcatgataaagttaatctcaaatatctgatagtaaaacaggaggtcaaccaatgaagagttttatggctagtccagcaacaatcgagagaaaatggtacgtagttgacgctacaggatatacattaggtcgtctggcatcagaagtagcaaaggttttaagaggaaagaacaaaccgatctttacacctcacatggattgcggtgattacgtgatcgtggtaaatgcagaaaatattaaagtaacaggcaaaaagttagatcagaagatctactacaatcactctgactatgtaggcggtatgagagagactacattaaaagagatgatggctaaaaagcctgagaaagttattgagttagcagttaagggaatgcttccaaaaggacctttaggaagaagtatgcttacaaaacttcatgtttatgctggtccagagcatgagcaggcagctcagaaaccggaagttttagaaatcaaattttaattaaaggtgctggaaggaggaaacaataatggctaacgctaaattttacggaacaggcagaagaaaaaaatctatcgccagagtatatattgtaccgggtacaggtaacattacaatcaataagagagacatcgataactactttggtcttgagacacttaaggtagttgttcgtcagccgctcgttgctacagagacagccgataaattcgacgtattagtaacagtacgcggaggcggatttacaggacaggcaggcgcaatccgccacggcctttcaagagctcttcttcaggctgacgctgattacagaccagttcttaagaaagcgggttatttaacacgtgatccaagaatgaaagaaagaaagaaatacggtctcaaagcagctcgtcgtgctccacagttcagcaaacgataagaaattgtatattatagtacacgtgaaaaacctgcagacattatgtttgcgggttttttttagatcataattgtggtatacttatactgtaaaagatatactgttaaggatattttataatgtgaggaggaaaatacaatgccggaaatatcattattctatggaatcagggtgacgatgtattatgatgaccataatccacctcattttcatgctgagtacaatggaaataaagcaatagttgaaatagatggagtaagagtaataaaaggtgccttgccatcaaagcagttaaagctgattttagcatggtgtgttttgcatcaggatgaattgatgcagaattgggaattatccaaagacggaaagccgatgaacagaattaatccattaatttaaggaggtggcagtatgtttccgaaggtagtgcaagtgatacccatgaaagattactctgtttatgtatattttgaagatgggaaaattgtatcttatgatatgtccaagatgattgagaaagaggcatttcgttcgctgcgtgatattaatatttttatagatacttgtacggtaatgaatgatactcttgcatgggatattggtaagaatcgcgatgttacgatgtgcctggatattgacccggacacactgtatgaattaccgatggcggtggaaaagatagcataatatatggtttggggacagtatgagcacatatgagcgtatatgggtaactaacacgtaactgacaaacagcttaaaaatggcgtatttacggcgttcggagttatccaagagataataagagactttataagaaaattatcagaacccttgaaaatgcaatgttttcaggggttctttcattttccttaacaaaatcacacattcttaacgattttctcgtttatcgacactttatcgacgggacgggtctacaatcatcctaaccttatcaatggcaatgaaaaaggcacaaaggcgtatctgctgtaagacggcaggtgtggccttttttgttttttggcggtgaaaatagtacacaaaacgtttctcatcgccgattgcggtaataagcccgcaaagcgcactttttaccggtttgggtaggaattttgctgccagaaccagaagaattccgaatcggaacaaaataaggttctacccggtgtcggccatgccatatgataagaaataaaaaggaggtttacagctatgaagaaaatgaaaaaacttgtatcagtcgttatgagtgtggcaatggtttattccctgacgggatgcagctcgggcggtaaagaatcagcagcgcctgaatcgaaaccggcagaaactcagacacccgcctcaggcgaatcttcagatggtgcgcaggcagcggcggacagcagtaatcccattaaaataggattcttttcgcctcttacgtcggcttccgcatctgcggacggagaaagtaccttaaatgcggcgaagcttgcagtggctgatatcaatgctgcgggcgggctcttgggaagaagtgtggagctggtggattatgatgacgctctcgacacgaaccaagcggtcagcatagcggaaaaactgacgacaaaggacggtgttgttgcaatcgtcagcggaagctacagcggaccgacccgtgtggcggctccgattatacaggcggcgggcattccgatggtatctgcttatgccgttcatcctgacgtggtaaatgcaggagattatatcttttcacagtccttccccggccaggttcagggcaaggcaggagctgttctggctgtcgataagctgggagcaaaacgcatttccatcattgccgttgatctggattacggttcagagcttgcgggaacctttgaggagtatgccaaggcgcatggcgcagagattgtttcctatgataaagtggcaatgagcgataatgaattcacctccatcatcacaaaattaaaacaggacgttaaaccggatctgatttatatggctaattattatgcacatgcatcggaagttatgaaacagtgcaagacattaggtctggatgtcccggttgtcggcacggagggcgtggattcctggcagttcctggagacggcgggaaagaatgcggacggactctatctgacgaccaacatggaccgtgatacaaaggacgagaatacacagaaatttatgaaagactacagagctacatataataaagagcctgacatggtcggagcttccgcgtacgatgcattccaggttatctttaaagcgattgaagaagcgggttctaccgacccggctgccattaaagataaaatagcatcgctgaaggatattgacacggttacgggaaaacttttatattacaccgaaaacggagaagctgtaaagccggttcagattcaggttatcaaagacggcaagtatcattattacgatataatagatgatccggaaatcattgttcctgagacaaagtaaccagtcgtatccagtacgggagaagagatgccttatttaaggcatctctttgaagatagaaggcggtgaattctatgttattgcagcagattatcaacggaattattatcggaagcgtctatgcactgacggctatgggcgccaccctgatatatggaattatgaggattcttgatatagccaatgccggagcttatgtggtgggagcttatatcggatactacatttatattacgacaggaaatctgccccttgcttttatattgtccatggggctgacgggtactatcggcgtgcttgtccacaaatgcctgtacggcccgatcctggcgaagccgcatatcctgcctattattccgctgatcaccagcgtcggtctttttacactgaccggtgatcttgtaagactgatttgcggagcgggaacaaaagcatacaacgcagagctgggatttggcgctgttcacctgggaaataatattgtcattgccccggagtggatcctgattctggttcttacggcagtcctgtttcttattttatggtttattcttaacaaaactacgctggggctggcgtggaaagccacggcagaggatccggagattgcaagggcggtgggaatcaataccaactctgcaacggccttgagctatatcatcggttacggttttgccgctgccgcgggtatcatggtcggaattctctataactccattacacctgctctcggcgagacgccatcctataaaatgcttgccattattgtattgggcggtcttggaaacccggtcggtaccgtgatagcgggactttttgtcgggctgtcggaaactctgatatctgtgtacataggttctttcataccgaaagattcgattgcgtttattgtactggtgttgatactgcttatcaagccctccggcttagtgagcaaaaaactctcgtaaaggaggggatggaatgagttatattattacggttgcggtaaatatagctatttttgcactgctggcgctgagcctgaatatcattaccggatatgcgggacagtcggccatgggccacgccgccttttttggaatcggtgcgtatacggctgcgctgatgacgaatgcaggaatcagtttctggctgagtctgccagcagcaatgctggtcacggcagcggcaggagggctgctcggtgtaatcagcctcagggtaagagatgactttctggccattacgacgatcggtattaactttgtcatggtggcgctctttcaaaacatgaaaatcttcggggcatccctgggaatgtcggtaacacctcctacgtttttcggcgcaaagatgacgccgatgcactttctggtgctccttctgattttaatcgtgctgacctgtctgctgacgcgcaagatgacgaaatcgtggtttggtctggctctggccagcctgagaaatgacgagggcgcagccatgtccttcggtatcaatgtaagccagtataaaatcctggcgtttattctgggaaccgcgatcgcagggcttacgggggccatctatgtgcaccgtatgaaattcatattctccagcagctttgcgtttaccgtttccatcagtatcttatccatggtggtggtaggaggaatcgggacgataagaggaccgctgctgggagcgctgattctgggggcggctcccgaggttctgcgtttcgccgctgattacaggatgattctgtatggaggaatcctggtgctgatgatgcggttccagccgcaggggctgcttggctgtgacagctttattctgcggggcctgcacaaactatttccgaaagataaggcaggtgagatgaatggatgagatgctgaaggtggaagaacttaagatgtatttcggcggtctgaaagccattgatgatttcagtatgtcggtttacgataaggagacgcttggaatcatcggaccgaacggggcagggaaaacaacgctgtttaacgcaatctgcggcgtttataaaccgacggacggaaaagtgctgctgaacggggaagagatccagggaaagctgccgtatgaaattgcaaggaaagggattgccagaaccttccagatatcgaaaccgctgggagatttgagtatacaggacaatatcgtggccgctctcggcatacatgaatatacaggcgttaaatcgttttttaaaaagagccatacaaaggagatgcttgagagggcggaagagctgatggaactggtggatttgaaggaataccggttcaaactggcaagggacgtgagcctcggatatttaaggcggctggagattgcccgcgcgctggctacggacccgtttctcatcatgctggatgaaccgtgcgcaggactcagcaattttgccatcaacgaggtaacggagctgatcatggggctgaaggcgcaggggaaaaccatcatcctgattgaacataaccttcctatcacgatgaaggtgtgcgacaggatcgtcgttctcagctacggtaagaaaattgccgagggagtgccggaagaaatacggaggaatccacaggtaattgaagcatatctgggagaggaggacgaaagcgatgctgaaaatctctaatctggaagtgaattacggaaaaatgcaggtgatcaagggaatcagcctggaagtgaaagaaggagagctaatcagcgtaataggaccgaacggggctggaaagacaacgctgatccgcactatcatggggcttaagaaagccgcatcaggcagcatttttttcgaagataaggatataacggcgctcccggcatggaaacgcgccgatatgggaatcggatatgttcccgagggccggcgcgtcttcggcaatctgacagtggaagagaacctgctgaccggatgttataaggtaaaggacaatgtgaggaaaagggccagtatcaaacgcgtttatgaactgtttccccgtctggaggagagaaagaaccagtcggccaggacaatgagcggaggtgaacagcagatgctggcaatcggaagggcgcttgtcctggagccgcgtcttctgctgatcgacgaggtatctatgggactgatgcccatcatggtaaatacctgcttcaagattataaaagacctgaatgactccggcatcacggtccttgttgtggagcagaatgccaataaagcccttaagatcgccaaccgcggatatgtcattgagacgggcaatatcattctggaggacgatgcaaaggtactccgggaaaacgatgtggttcagaaagcttatctgggaagctgatagggagaactgcaaagaaggacagatgcggaaagagggacggaaaaaatcagcagaagaaaagacagcaggaaaatacaacagaagaaatgacagacacgaaaggaaggtcatagcagacgcaaaagaacaggatagcagggaggggaaggaataaagaaatggaacaagcagggaagtaagtgaggattcggatcgggcctgaattccgcctgcttccctgcattgccgttatacaggctacttccccattatattaatggtttccgactgatgcatcgtgaaaggccggaaggcaataaatgtaatttttcggagcggcttctggggggacatctgccgcttctgaattataatgtaaattttacatatatttacgatgcagcctgcatgggattttacattgttccgttataatagcagcaggggatatgctgcatgcttcatcccggccctaagacaaacgcctgaaagcgttcggagaagtaacggcatgtctgccgatcatatgatagagcaggtaataaaaattgccttaaaggaggcctgtgaatgattaaaacctatgtagtggatacgaatgttctgatccaggcgccatatgcgctgaattgttttgaagataatcaggtggtgattccggtggtagtgctggaagagctggataacctgaaaaaagctgagggggagcgggggaacaacgccagacgggccatcagactgctggaacagctcagagtctcaggagatcttttagaaggggtcaggcttcccggcggcgggatgctccggatcgagaaaaattttgtcgatgtgaagctgcccagggatcttcccgatgaaaaagccgacaacaggattctgaaggtatgcaaaggactggcggaaagctgccgggacgggaacagggcggcccatataacaggcggggagacggaagaagcctcccaggtgattctggtaacaaaagatatattgctccgcatcaaggcccagattatcggtatcagagcagaggatttcacaaccgaacaggtatccgacaaagcggagcaatatctcggaagggcggaggtatttgccccggaggagctgtttaaggagtttaagaaaaaaggaatttctaccgaagaagtttacataacagacgagaacggaaagcattcaggtctcaaactggaggaaaacgaatttattatattaaaggcggatcagtccacaaagaagaccatgctggggagagtggagaatgggcggatccgggaactggattttaagaagagccgtccttacggtgtcacaccgaggaatgccgggcagtattttctgcaggaggcgctgatgcagccggccgagaaggccccgcttgtcatagtcaagggaatggcgggaaccagcaagaccttttattctctcgcggttggtcttgaaaagcttgttaataatccgaacggggaataccggaggattctgatcagccgtccaaacgcccagtttgacacggatatcggcttcctgccgggaaatgagcaggagaaaatttcccctctgatgcggccgattattgataatctggaacagctcattgactccagtgaagagcagcgctattccaatgagaaggaattgagtgataagatacaggagatatttgacaggggactaatccagacggaggctctgaattatatcagggggcgttccattgtgaaaacgtatctgattatcgatgaagcccagaatatgacgccgaatcaggtaaagggaattatcaccagggcggggaaggacacaaagattatacttctcggtgatcccaaccagattgaccggccctatctcgacgagagaaccaacgggctgagctatgcggcggaatatatgaaaggcagttctctctgctggcagattacgctgagtgcagaggaatgcgaacgctcggcgctggctatggatgcagtaaaaagactgtagtataatcatcggcatgagatgaaacagaatattaaaattttgtaaaaaacagttgactttatagctatgaagtgataaaacaataaacgcatagtaatgtacgagtcttaaacgaaaatgcatggatggggaaatgttggatggaattgcccgtttcagagagtcgccggctgctggaaggcgatacggacgccatgacaatctcacccctgagcagctttcctgaacatgccgctggcggatataacatctgcggtgtttatagggaaagacggtttcttaccgttaaaaaagatgctgttaaagagaccatacggcctgagacagcaaaaaagaggctgtgtttatataaacatggcaaggcagggtggtaccgcggaattatttcgtctctgcagcgtaagctgcagggactttttatatttatcaggaaagttttcctgttaaatataaaacgctccgcggagtatcgtactgcaaaggagcgcaatgcgcgataaggccggcaagtacttatgcaaatgggaaaagagataaaaaagaaagagggaaaacaaatgaatggtattacaatgatggtactggccattgtagtcttaggcggagcctatttactgtatggccgttatctggaaaaaaaatgggggattgaccccaaagcaaaaacaccggcttttgagatggaggacggtgtggattacgttccggccgatacgaatgttgtctttggccatcagtttgcttccattgcaggagcaggtccgatcaacggtccgattcaggccgccatgttcggctggcttccggttcttctgtggattctgatcggcggcgtcttctttggagcggttcaggatttcgctgcgatgtatgcgtcagttaagaataagggacgtacaatcggctatattattgaggaatacatcggcaagctgggcaagaaattatttctgctgttttgctggctgttctgtattctcgtggtcgcggcgtttgctgacgtggtcgcgggaaccttcaacggttttgtgacggccgacggcgtaacctccactgttgaggccaacggcgcggtggcgacgacctccatgctgtttatcattgaggcggtggcactgggaatgattttaaaatacggcagactgggcaaggggctcaataccgccattgcaatcggaatgctggtggcggccgtgggaatcggtctctgcttcccgatttacataacaaggccaacctggcatattattatctttatttatgtgctgatcgcttcggtagcgccagtgtggagcctgttacagccaagggattatttaaacagttatctgcttgtatttatgatagtcgcagcgattgcaggcgtgtttatctccaatccttcctgtaacctgaattcttttaacggatttaatgtggacggacagtatatgttcccaatcctttttgtcacaattgcctgcggagcggtgtcgggattccactctctggtatcctccggtaccgcgtccaagcagattaaaaatgagaaaaatatgctcccggtgtccttcggcgccatgctgatggaaagcatgctggcaattatcgcgctgatcgcagtggcatcctttgccgacggggaagcggcggcagccggacttacgactcagcctcagattttcgccggggcgattgccaacttcctgacggcggccggacttccgtacagcctcgtgtttaccctgattaatcttgcggtttcggcatttgccctcacctcccttgactccgtggcccgtgtgggacgactttcattccaggagttttttatggaagatgagacggaaggaaaggaatccagctcatttatcaagcttatgacgaataaatactttgccacagccctgacgctgattctggcctatctgctggcaaaggtcggatacgctgagatatggccgctgttcggttcggcaaaccagctattatccgtattagctctggtggcctgcgccgtattcttaaagaagacaaaccgtcagggagcgatgctctggattcctatggtatttatgatggcagtgacatttaccgcacttggaatgacgatattcaaactcggcagcgccttctttaccacaggcctgagcttcggcaatacgcttcagcttgtgtttgcagtcctcctgctgattctcggggtgattgttgccatccagggaatccagaagctggttgggaatgataaggctgcggacggtattgccggcaaggaaaaagaattagcataaacattaacgtgaatgccgcaaacggacttaaataacagcggtttgcagactgcttagggcaaaaagatgtcaaaaaaaatgatatctttttgcccgttttcgtttttattaccaatattcgaaagtttgactgtaaaatttatgcatgctattgagaaatcctttttccggtgatataattcttccaattgcagcaagagggacagacattaccgggatgatgaagagataaagcatatgatgatataggaaaagacatatgcaggggaacagaggttaagatggaaaaaaagcacatgttcagcaacagggatctgaggaagctgctgataccgctggtagtggaacagatcctgaactcacttatgggaacagcggacagtatcatggtaagtaatgtggggcctgccgccatttcggcagtttcactggtggattcaatcaatattctggttatccaggcattctatgcgctggcggccgggggagccatcatctgctcacagtatattggccagggagaccataaaaatgcaggccgatccgcaaatcagctggtttttgtcgttacggtcatttcagcagcggttaccgcggcttgtctggcattcaggatgcctcttttgaagctgattttcggtcaggtggagccggccgttatggatgcggcccagatctatttcttctttacaacattatcatttccgtttattgcgctctatgatgcgggctcttcggtttaccgggcacaggggaatacaaagctgcccatgacaattgccgtggtttccaacgggcttaacatttgcggcaatgccgttttaatatggggatttaaaatgggtgtcaccggtgcagctttggctacactgggttctcgaattttttccgctgtcatcgtatttgcttttttgagaaaaaaagaccagactcttgtcatccgggattatttcaaaatcaggccggatttatataaaatcaggatgattctggctgtcgggataccgaatggaattgaaaatgccatgttccagtttggaaagctggcgatccagtctacggtatccacaatgggaacgattgcgattgcagcgcaggctatgaccaatattatggagaatctgaacggcatcgcggctatcggtatcggcatcggcctgatgacggtcgtcgggcagtgcatgggagcaggccggaaggaggaggcggtttattatattaaaaaactgagcggactggccgagattgtaattattataagctgtctggctgtttttgccctgacaaagccgatcacgatactggcaggaatggagaaagagagcgcagatatgtgcttttatatggtagggtggataacgtttgtcaagccccttgtatgggcgctggcatttataccggcttacggactaagggcggcgggggatgtgaagttctccatgtgtacctcctgtgtcacaatgtgggcattccgggtaagcctctgtattttcctgtgcaggcagtttggctttggcccgatggccgtatggattggcatgtttacggactggaccatccgcgccgtcatttttacctggagatttttgagcgggagatggatgtctcataaagtggtctgacagatactgtccgcagaaccgcgtttttcagcggggctgcgaaaagcaatatggagcagggcgatcggaaagggaatgttggagaatggtaatcggaggataaaaataatggaaccaggcgaaaacttgtatatggggggcggaattctccgccggggagacagagtgggactgtcctgctgttcaaacggacttttggaggcagacaaaggctctctggagctgctgaaggaaaggctggccctgattgggctggaggcggtggaaagtcctttcctgtacagaggcgttaccgcattcagcggaaccgggacacagagagcgcatgcgctgatggatttttaccgggatgagaccgtaaaagccgtttttgacgtttcgggcggagatatggctaatgaggtactgactgatttggatttcgaaatgatcagcgcctccgataagatatttttcggatacagtgatttgacgacggtgattaacgctatttatacgaagacgggaaaaaagtcggggctgtaccagctgcgcaacctgacgggcccctgctggcaggagcagttctcccaattcagggaaacattgatggagggcggaagtatgctgaacaacttctcttttcattttattaggggaaccaggatggagggaacagtgctgggcggaaacatccgctgcctgctgaaactggcaggaacacagtactggcccgattttaccgggaaacttctgttccttgaatgtaatggcggagaagttccgcagattgtggcgtatttaaaccagttgagccagatcggggtattttgtcagatatccgggattttgctcggaacgttttctagaatggaaagcagaggactgcatcccacggtggaagaactactgcttcggatgatccgcccggaacttcccgtggcaaaaacatttcagattggtcacggaagcgattccaggtgtcttatgatcggtgatcatatcagaattcatcaggcgctgcaggaacagaaaccgccggcctgagtattgcagctggttactggcagcggtttatacttgatatccggaaggcaaaatgatataatttttaataattgtttgcaggctgcattttgtggtgtgatttaccgattccaacgccggagtgagcggtggctggattagataaaaatcactttgtaagtattgtaggagaagaaagatgatgaattataaaaagtataagcgtgtaccggtagttgatttcccccggagggaatggccgaataaagagattaagaaagctcccgtatggtgcagcgtggatttgcgcgacggcaaccaggctctgattgagccgatggtggtggaggagaagattgagatgtttaatcttcttgtcagaatgggatttaaggagattgagataggatttccggctgcctcccagattgaatttgattttttaagacaattagttgagcgaaaactgattccggacgacgtggtagttcaggttctcactcagtgccgtgagcatctgatacgccgtaccttcgagtccattcagggaatcaagaaagcaattgtacatatttacaattccacatcgacacttcaaagggatgtcgtattccacaaagagcgtgacgaaattaaagaaattgccgttgaaggaaccaaactggttaagaaatatctggacaaccatgaaggagaagtgattctggaatattcaccggaaagttttaccggcacggaattagactttgcccttgatatctgtaccgcagtacaggatgaatggggaccgactccggagaaaaagatgattatcaatcttccggctacggttgagatgacaacaccgaatgtctatgccgatcagattgagtggatgaataagcacttcaaaaaccgcgacagcattatcttgagcgtacacccccataatgacaggggaaccggcattgcagcggcagagctggcgcttatggccggggcggaacgtatcgagggaacgctgctcggcaacggagagcgtaccggtaacgtcgatattttgaatattgcatacaatatgttctcccaggggataaatcccggattggaaattgagaatatcaaggagattacggagatctgcgagcgctgtaccaaaatgccggtggatccgagacatccttatgcaggaaagctggtatttaccgcattctccggttcccatcaggatgccattaacaaaggaatgcaggctcttgcaaagaggacagacggcatatgggaagtgccttaccttccgatcgatccgagcgatatcggccgggaatacgagccggtagtgcgcatcaacagccagtccggcaagggcggggttgcctttgtcatggacagcttctacggattccgtcttccaaagggaatgcacaaggaatttgcagatattatccagaggattgcggagaaacagggcgaggttgcgccggaacagattatggacgagttccgcatcaattatctggatcgcaaggaaccaatgcatttcaaaaaatgccagattacggaccgggagtacgagggaggcggatttgccacggttgcccaccttatcttcacggatcacggcgaagagcgggaggttgacggcgtaggaaacggcccgattgatgccattcaaagaggactcgaagatgcactcggcatacagatccgtgttctggattacgacgagcatgcactccgctccggttcgggtgcgcaggcggcttcctatattcacctgatgaatgtggaaaccggagaagcgacatacggagtcggaatcagctccaatattacgcgggcatcgatccgcggtatattcagcgctgtaaacagattattttataaataagggataaaaagagttcgcagcgtgcctgaaaattcaatcccgctccgggaagttaagcgagttgtaaacaggtaaacagcagtgtaaaaagccttttccaggtgccgcctcatagagcggcgccgggaaaggcttttattgatgacggtgaccgtgcgcggagcgtgcaggttatcgttgtccgccgtccgtatgaaagccggcattgtctccggagcctttcttatgactggttcgctgcggaaggaaccgatatgcatcaggcgatcggtttttcctcgatcaatgtcacagccccgttttccacctcgatgaaaaacggcatttccggttcatcagagtcggagaagctgcgcccccagtcgatgaaacggtattgtgtgtcggctgtcagcttgagtatggtccgggaccggctgggattatggatataatatccgtccggcatatcgtgttccgtcagtttaagggagcggactttttccttgtcttccggtgttatccactccaccatatccacccacaggttatcgttgtccatccgcctgataaacgcgcaataggagccggagggctttgcttctttccgtcgttggcagatatgccattctttatcctctgacagtaccatgattctgccgtccccggagtcccaggtgtatgggctgcctatacagccgaagttggactgtccttcctcacccggaattgcttcaggctccagagaggatgagatatacccgtccacactgcctgaatcgcccatggggccgatttccgaggtgccgtaatagattgccccgtctgcaaaaagtatcctgttctcaaattcactgtctgcctgttccgacagagaaggggctttggtattgttattttgtgacccgccgtcatattccaaactgtcgccggaaccatcctccgaaggggtatcagtgtcggagaaggtgacggtgacgaagagaacccggtcatacccccgcttttcaaggtcgggaagattatggtaatccgtcacattaccgcttgtgatggtatctgactgagtgttcgccaccatggccagaacctctttctcattatagtggaaggaggagagggtgctgagatggctggtgatgctggatcggtatcccgaagtggaattaatcaggcaggagtatctcccgccatcccaggagacagtaatctcgtccggatccatcaggacggataaactgccctcggagggagcaggtccgcctgtccgggccaggcagaccatttcgccatctttaaattcctcaacagaaaaaataagctttttcagcttatcatctgctttatatctgaaaatccggctggaagaatgggtgtccacaagggaaatcaggtcacgttccctgtcggacaggggcatctcgcttatttccatgggggacatggcgtcaggggaggaacttttctgacggccgcaggccgtgagcatcacaccggccagcgctattacggggagcagaaccggtaaaattttatatggtgataatttgttaatatgtttcaaaaagattctcctttctgatgtgcgcggaacgtgcaggttatcgttattttaccatatgtccggttgccgctttttacttttttattacttcttttgtgctgaaatatgaaggtttccataataaatatgattatatcggagtggttgcggtggaaaactgtatttaattataatgaattgttgacaattttattgcttaatgtatactgaaagataggaaaaaacagggaggggattgtatgaaagcggatcagggaaataacttaagtgaaatggtatatcattatttactggatatgattttatccatgaaaatcaagccgggagatcgaattccggaggccaggattgccactcagttcgggatcagcagaactccgatccgtgatgcgatgaagcagctggccaatgacggcatactgaatatttatccgaaccgctttgctgaagtaaaaatgtgaaaattaaatgaaaaatagaacataatatggattttcctgtaccagataaacaaaaaaataattaaaaagtagacagttttaacaaatatataggctctgcaggagcagcacggagcgtgtaggttatcgtttgctcagtgtcacaggcagtgaataatgaaagataaaaaactgcaaaaagattggcaaaggctttatttgtagataatggctgctccgtttggggcagccattttgtacggtgttagtaagataaaatttttactgatatatctaatacgatacagctatagtgtgatataatgtgaacagagcaggtgtgatgcctgcaaatgtccaagcactggggtgagttttatgtatttttcctaagtgcagctatattctgaatattgatgagaacaaaaattaagctatgaagatatgggaaattgcatcggatgatgttggaatttagaaaagcaacatattttactgggaaaggaattgtgcagtttttatgacggaaaccatagaatattataataaaaatgcagaagcatttagggataatacgcaaaatgttgtttttacggagacacaggaaaaatttataaaatatctaaagccaggcgccagaatattggatttcggatgtggttccggaagggatacgaagtattttcttaataggggattccagacagaagcgacggacggctcggcagaacttgttaagatagcctcggaatacacggggattcaggtaaagcaaatgctgtttcaggagctggatgagaacaatatatatgatggaatatgggcctgttcctcgattttacatcttacgagaggtgagctgacagatgtgcttaaaaaaatagctgcggcgcttgtctctagaggcgtggtttatacgtccttcaagtatggaacagaagaaacagaacggaacggccgttactttacggatatgacagaggataaaataaaaagattgctggatattgtgggcctgttccttatagaagatatgtggattacttcggatgtgcgtccgggaagagaagatgaaaaatggctgaacttaattttacggaaaaagagttagaaaacagggagactatgctgtggaaggatgaacgctgtgaagcgattacaggcggcgaaaataaaaacaggtttttgctgtatcagttgaaatatagcatgatgaatgcagatcgaatggacatcattgtgtcttttcttatggaatccggggttagaatgctgttaaaggatttgcagagggctttggagcggggaaccaggattcggattctgacgggaaattatctcggtattacgcagccgggggcgttgtatttgataaaagatgccttgggtgatcagattgaccttcggttttacaaagagaaagagcgttctttccatcctaaggcttacatatttcataaaaaggaattcggtgaaatctatataggttcctcgaatgtatctcgaagcgcccttacatcagggatagaatggaattatcactttgacgttttcagggataaggataattttaaccgtttttttgagaactttgaagatttgttttataaccattcgattgtcattgatgatgaggtattaaagcaatattcgaaggaatggaagaagccggcgttacagaaggatttggacagatatgataacgtaagcaaagatagccgcgataccgaggctcagatgctgttccagcccaggggagcgcagatagaagctctttatgccctgaagaacagccggagagaaggggcggataagggactaatctatgcggcgacgggagttggcaagacatatcttgctgcatttgactccgcaggatttgaaaaggtattgtttgttgctcacagggaagagattttacggcaggcagccaaaagcttccagaatgtaaggcattctcaagattatggtttttttaccgggaaagagaagaccgtgggaaaatcagtcatttttgcgtctgtggctactttgggaagacaggcgtatttacatgacaggtattttgctgaagattattttgattatattgtaatcgatgaattccaccatgcggttacggagcagtataagcggattatggcatattttaagcccaaatttctgcttggactgactgctacacctgagagaatggacggaagaagtatttatgaattgtgtgattataatgtaccctatcagataagccttcaggacgccgtgaataagggaatgcttgtaccgtttcattattatggcgtttatgacgagacggtggattattccggcatacgtaaagtgaaagggaaatatgatgaggaagaattgaccagggaactgttggtaaacaagaggtatgctctgatctataagcactacatgaagtatcggtcccaaaaagctctgggtttctgttgttccagaaaacatgcggaggagatggcaaaggagttttgcctgcgtgacataccggctgcagcagtttacagcaattctgatggcgggtattcagaggatagaagtgtggccctgcgaaaactggaacacggggagatcaaggttattttttccgtagatatgtttaatgaaggtttggatatcagtgatattgatatggtgatgtttttacgtcctacggaatcaccggtagtgtttttgcagcaattaggaagaggactgagaaaaagcagagggaaggattttttaaatgtcctagattttatcggtaattatgaaaaggccggctcagccccgtttttgctcagcggaagaccgtattccagcgcggaagccggaagaatgcagcagtcagattttacatttccggatgactgtgttgtagactttgatatgcgtctgattgatttgtttcaggaaatggcgaagaaaagggcaaaaaaagacgatagggtccgcgaggaatatttccgcattaaagaactgctggatggcagggtgcccagcaggatggaactatttacttatatggaagatgaggtttatcagatatgcagtgaggtgaaaaacagtccgtttaagcactatctgagatatctggatagtttgaaggagcttggggcggaagaggaggctgtttatcatagtatagggaatgagttactggaaatgatggagactacgaagatgacaaaatcctataaaatgccggttcttatggcgttttataatgatggtgatattaagatggaaattgatgaagaagatatttatcggagcgatatgacattttattatacggcgaataactggaaggacttagaaaaagataagtccaccagagattttaggacatgggacaagaagaggtgggttagtgaggcactgaagaatccggtgcgttttttgatggagtctgggaatggtttttttataaagaaggaaggggcggtactcgcattaagggaacagcttcatgatgcagtgaaacagagtggatttgcggagcagatgaaggatatcattgaatatagggtgatggattattatcggaataggtatgaagcgatataagattgaaagctcaaaaggaggaggtgtggctgcgtacgaatataaaatttatggtaagaaaataagaaaaaatagttttatacaaaactgctgatgaaaaagaaaatggtaatgagaacccggaattatttcccggcggcactcagttcaaatcagattgccgccggataaaacacaatattacacatccagtaatatatatccaatactactaattcttctcacttaaaaaaacatctcctcacaaatccttttccccgtctccgtccggaagatattatgataagccgcatcggcagcctccggttccagtccttcttcaaacagatttaccaggaaatcggcctccagcagtatctggtaatccaggccgtccacatcggaataagtgtggtgatgaccgaccagatagcagacgcggtcgacaacggaggcgcggaaaccgagggaacggagcagtttttcagcgggttcaggtccttcctgttcctgcagcttgccgttgcagtagccatacttttcttcggcaggtttaatcccgatatcgtgtacaattgcggcggcttccagaataaactgggtatcgctctccagattctccgacagcccaatcagacgcgcgaagctgtgaaccttgataaggtgctgaatccgtttcggatcgccggagttgtagctaatcattttcattaataggtcgtctaaaatatccatttcaaaattcccctctttccgctgcgggtgaggtcacacccgttataagaatacaattgtgtaagtaaagttcggacagcatgaactgttatctagagtatacctgatttgcgccgccgctacaacgcctttgtttacttttcccttaaagtatagtaaaataagtgttactattcacagccccgctgaaaaacgcggtttagcggacagtaacaagtaagtaacaattcagacaggcctgcacacttactgtgccgaccatactaaaatgcaatggcagacacccgttaaagggcgtctgatgctgtaattgttgcaatcataatggaggaattcttaacggatgaaaaagtatgattatcttctggtaggaagcggcctgtatgcggccgtatttgcctggatggccggaaaacacgggaagagatgtcttgtgatagaaaagagagagcatattggaggcaatatttactgtgaagaaacggaagggatccgggtacatcagtacggcgcccatatcttccatacctccaaccgggaagtatgggattttgtcaatcaattcacggagtttaaccgttataccaacagtccggtcgcaaattataacggcgagatgtacaatatgccgttcaacatgaacacattcagtaaaatgtggggcatttccaagccggaagaggcgaaagccattatagaggagcagaaaaaagccgttcccggagagccggagaacctggaggagcaggcgatcaagctggtcggtacggatatctataaaaaactggtaaagggctatacggaaaagcagtggggacgtgattgcagggagcttcccgccttcattatccgccgtctgccggtgcgttttacctatgataacaattattttaacgatccttatcagggaatcccgaaagatggttataatgctattatagaaaagctttttgagggctgcgaaatcaggaccggaacagactatctggagaaccgggaagattacgacgggatagcagaaaagattgtttacaccggaatgatagatgcgtattacgattaccgcttcggcaatctggagtacagaagcctgcggtttgaatcggagcttttggataccgacaattaccagggagtggctgtcgtcaattataccgacagggaaactccgtttacgcgaatcatcgagcataaacattttgaattcggaacacagccaaagactgtcattaccagggaatatcccgaagactggaagatgggcatggagccgtattatccggtaaatgatgagaagaaccaggagctttacggcaaatatgccggacttgcagccggtgaggataatgtgattttcggcggccgcctggcagagtataagtactatgacatggataaggtaatagaatctgcgctgaaacgtgcgaaagaggaatttggagatgagcagtaataaaactgtaacccacgggcagataccggccggccggcccgctgctgagccggatccgcaggcacagggcaggttctacgaaccggaaatcctaagccgcctgcagcaggaaatcctctcaatccttgatgattttctgctaatctgtgaaacgtaccatctggaatatttcggcattgccggaacgggaatcggtgccatcagacataaggggtttatcccctgggatgatgacatcgatattgccatgcccagaaaagactttgagaagtttctgaagattgtgcagaagaagatgggcgataaatatcttgttctgaatgcaaaaacatgcccggcatatcctctgatgacgacccggcttgtaaaacggggaaccgtatttattgaggaagtgatgaaggacgttgactgcccgttcggaatttttctggatctctatgtgctggacaatgtttccgacaacccggttatgtatcaggtgcagtcctggacggcatggtttttcagcaagctcatgatccttcgggccattccgaaacccacactggcacagaagggatggaaggcaaagctgatctggtcggtctgcggcctggtttacagcagcatgaaactgctttgcatttcgccggaaggcctgagaaggcggtgcgaggcggtatgcaggcggtatgagaagatagatacggaccggatggcattccttcccgacaccagcccttattggaatctggtggacaagcggaaataccatcctctcagaaaaatagaatttgagggaagaaggattaattttcccggcaatatagaagagatgctcatcaacatgtacggagacttcatggagcttcctcctgcggaaaaacgaaaaacgcattatccttataaactgtccttttccggcggagagaatcccggggtataaggtactccgccgtgaaaaatatgacaacaaatgaaagacaggtaaccgtgatgaatctactcagaacactcctgattggcggagatgataatctggaaaaacggaatatggtctggaacatgctgggaagcttgctctatgcgttcgcatcgatggttctgtctatcgtggtgattcaggtagtgggagaggacgaaggtggaatattcagcttcgccttttccgcattcggacagcatatgtttatggtcgcctatttcggaatgcgtccctttcatattacggatataggaaggcgttacacctttggggaatatctgcgcctgcgttttgtaacctgcggcggagcgcttgtttttggcctgctgtatgtatactttaaccaggatacttatacttacgtaaagaccatgacggtgatattaatggtttgttataaggtgatagacggctttgccgatgtatacgaagccgagtttcagagagacggccgcctttatctgacaggaaagtccaatacgttccggacgctcttttcagcgggcagctttatcgcctgccttgttatgagccataacctggtgctgtcctgtatggtttctgtgattgcacagattctgggcgtcctgatatttaatatatccataatcggagagcttccccaggtggactggagctgccggaaaggcagatgttcgctgctgtttcaggaaaacttcctgctgtttctctcggcgattattgatttctatgtattttccgcatccaaatatgcaattgagggaaatatgctgaacaaagatcaggccattttcggagctatctttatgccgaccagcgtcattaacctggtggccggtttcgtaatcaggccttatattacaaagctgtccctggtctgggaaaaccgcgaatttgcgaatttcgcgaaggtggtcggccgtctggctgccatcattgccggacttacggtgctggctttaggcggagcatggttcctgggaataccggtgctgagcatgctgtatccgaagttaggatatgcgattgcagacagccgcctgccgctgcttctgatcattttgggaggagcgtttaacgcctatattaacctgttctattattcactgattattatgcagaagcgcaggcacatatttgtcatatatgccctggtggcaggggccgccttcctgatttcctctccgtttgtgaggtggatgggaattctgggaggagcgttgtcctacctgatgctgatgtttgcgctgacagtctgctttgggctgacggccctctatttttacaggaaagaaaaccgaaatgggaggaaaatggcgaaatgattaattttacagttggacccgttcagatggaggaagagatacgggaaatcggcgcagaagagataccgtatttccgcacgccggaattctccgcactgatgaaggaaaatgaatccctgatgacccgttttatgaaggctggtgataaggccagaacagtgtttctgacagcctccggctcaggggccatggaggcggcggtaatcaacctttttaccccggatgaccggcttttggtggtgaatggcggcagcttcggcgcgcgttttgtgaaaatctgtgctgtccatgggattccttatgatgaaataaaactggagagcggccggaaattaacggccgggcatctaatgccctatgcaggccagggatatacgggttttctcgtcaatgtccatgaaacttccaccggagttctctatgatatggacttaatcagccgtttctgcaggaaaaacgggatgtggcttgtggtggatgccatcagctcttttctggccgatgacttcaggatggaggaatggggcgtggatctggtgctgaccggatcacagaaggctttggccctgcctccggggattgccgcggttgtgatgaatgaaagagcagttaaacgggtggaaaaggcagaacccaggtcgctctattttaacctgaaggactgtttaagagacggggaacggggacagactccgtttaccccggctgtcggcatcctgatccagatgaaccgcaggcttaaaatgatagacgaaaagggaatggaaagggagagggagcagatagaatcattggcatcagatttccggcgccagatttccggtatgccgtttgaaattgtatccgaatcgctgtctgcggcggaaacgccccttcatcccaccggaacgcttcccgacggaagtccggtatcggcttaccggatttttgagatactgaaagacgaatacgggatctttgtatgcccctgcggcggtgaactggcagagaaggttttccgcgtgggccatatagggcatcttacggcagaagataataaaaaactgattgatgcattgaaagacatgcagaacagggggcttttgtgaaaacactgattttagcggcaggacgagggacgagaatatcgcgttatctttccggaaacccgaaatgtacggtggatatcggggaaggaaaatgtctgatccagtatacggtggatctgctgaaatccaggggaatccgcgatatcgggattgttctgggatataagagccaggtgatacgcgacgttcttgagggccgggaggtttcatttttctataacccgttctacgatgtaaccaacagcattgcttccgcctggtttgccagggattttctcgaaggagacgatctgctgattatgaatggggatgtttacctggaagaccgtcttctggatcggattctggcggagaagaagagtccggtgatgtttgccgatgagagccggaaagagacggccgattataaatttttctatgaagacgggattttaaaaaaatacgggaaagagctggagggcagcgatattacaggtgaatatatcggaatcggccggtttgccagagcgttccttcccgaattttgcggcaggatggaagcgatgattaaccggcaggagcattccgtctggtgggagaatgtgatttacggactgacaaaagagatgccggtctatgtggaggacgtggacggacatttttgggcggaagtagattatatcgaggattacgagcggattctggaacacagaggcgtggaaaaaatcgtgagatagtataccgtaacaattcagtcatgatgtattccgcgaggtgttttcccgtttctgtgcatcgtttattgcagtttggccaaaggctgaactgtaatagcttacccgataaatagagcaggcaggtgtggactttgaaagagaacgttcaaaaagaaattataaaaaaccaaaagaagctggctctgaccgtgctggctgttcttattgcaggcatttttctcgaaatattctgtaatcttccgctgatccgggcgaactccgggaaaaaccagggcagtttttcagttgacataagtcagactacttatgagggattccatgaagacggaggaaaactggtatttgacgggaacggcggcaagatacgcgtgccgcttagcggacgttatgtggacaagttatgttattcctacgaatatgaggggctgctgaatgccacggtgaaggtgggagtttataatgagtacggcgagctgcgggagcgtgacatcctgacggtggaagacagaaacagcaagaatataaaaacttcctggattcctgtgggaaagagggcggagtatgcggaaatctatattttccgggatgctcttgacgagccggggctgtcttatattgatttttccggttttccgttaaaaatctcaggttttgaggcagtcacaatccctgccgtcaactggtacaggctgtgcttcttctggtgcgcccttggaattgccgccatgctgattttcttccgggagtattttggaaaacggattgaagtgggattcctggttatttccgtcaccatagggacgcttttctccctgtccctgccggccaataaggtgagctgggatgaggaggttcatttttcacagagcttctggctgtccaactacagaacgccggtatcggtttcccctgccgtcacccaggagtttattgccgggattgacacctggccttataatcagccgggaacagtggaagaacagagagagcttgacaattatctggacactgcgggcgattaccggaacgggggaattacctggagcgctgatttaaataaaacaatttttaccggatatgccggcgaggcattattcctgaaagcgggacagatgtttcgtctgcccttctccctcgtatataagctgggaaggctgggcaacctttatatttactgtatcatcctctgtctggccatcaggaaaacaccggtcggaaaagggattatggctttcctcgggctgatgccggagccgatgatgctggccggggtatattcctacgacccgactgtgacggcttttatgtatttatcctttgcctgcatcctccgggccattttagatacggagaaaaagataacctggacggactatgccgtgatgatgctggcattcttctggggatgccgaatcaaggcggtatatgcgccgctgctcctggttggcctgttaatacctgcggatcatttcagaagccggaaagagcgtcttatcatgaagggcggaatgatagccttgtgccttggactgatggcctcttttgcactgccggcaatcttttcacccagcgagacgggagatttgaggggggagaataccagcgaggcaggacagatgtcctatatacttggacatccagtcgcttatgcaaagatattgctccaaaatatctttaataccctgccttcttatgtaatgggcgaaaaatcgctgggactgctgggacatcagggagaggcagcgtttccctggctgatttatgcaggctctgcggcagttatcctcacgggtggacagtcttcctgtggaaaacgtcttgactggaagcagaaattgtggatattcgtcctcgcatcggcggcagttgtccttgtctggacatctatgtatcttgtttttacaacaccgggcaatacttatattgacggcgtgcaggggcgttactacattccgcttctgttcctggtatggctggtgtttaacccgaaatggattaccgtacaccttaaaaatcaggattactacgcagtggtgcttgcgctggcaggaggaattcttttgtcagagtattatgtgaatgtgctgcagaagttctgtctgtaacatttaaattgaaaggaagtggcaggatgaagatacagaaacgaggtttggttaagtccggcattataaccggcgcagacaaagaaggacagccgttgcatacctttgcagtctgtgcctataaggattcgccttatctggaggcctgcatccgctctcttacaaaacagcaggtaaagacagatgtgatttgctgtacctccactccgagcccttacatcgaaaaaattacaaagaaatatgcggttcctctctatgtgcgggagggagagagcaacatcagggaggactggctgtttgcctggcataaagccggtggccgtctggtgacgattgcccatcaggacgacgtttacagaagcgattatacaaaggagctttatcaggcgtttgcgaaataccccgacatgtcggtttttgtcagtgattacatgacgttaaagatgacggaaagagggatgaagaccgagtgcttcaacaaggtatggctggtgaagaagatacttcggatgccgctccggctgaaattgctgtcaggactgcggccggtaaaacgaagcagcgttatcttcggcaattcgctctgctgtccggcctgtgcgtatcagaaggagctggcgggggaagagatgttccgttccaggtatgattttgctctggattgggataatctttatgagcttgcaggacaaaagggcagatttatctgcgtggaaaaaccgctgattgcatacagggtccatgagggggcgacgacgaaagcctgcattgaagacaacaggcggacaaaggacgagatggccatgttcgagaaaatgtggcccggatggcttgtgaagattctgatgcatttttacgtgaaggcctatgacgaatacggtaacagttgagacaggtctgcgcactggctgcgctgaacgtgcgaaaagatagtggcagcaggcattcggtaacagttgagacaggtctaaaaattagtacaataagtacgggatggcaaagcgccgggaggacgagatgagttcggcagaagtaccggaaaacggaagaataaaaatagatgtgatcattcctgctttcaggccgggtgacaagctggagcagcttctgaagcgactgcaaaagcagacctggcgtccaaacaggatcattatcatgaatacggaacgccagtattggaatgcagagcgttacgagccgctgtttgagggcagtgagacagaactgaccttaatccatctggctcaggaggattttgatcacgggggtaccagacacagggggattcttgaatcggatgctgaaatctgcatctgtatgacccaggacgccataccccataacagggagctggtaaaaaatctggtttcggccctgatggccggggaagatattgcggcatcctatgcgagacagcttccagcggtggactgcggagtgattgagcgttttaccagagattttaattatccgggtatcagccgggtaaaggggaaggaagacttagaaatacttggcattaagacgtatttctgttccaatgtctgcgccgcttataaacgtgacatctatctgaaactgggaggctttacggcgaagacagtatttaatgaagatatgatttacgcggccacagccgtaaaggcgggatataaaatagcctatgcggcaaacgcggaggtgattcattcccataattataaagcaatggaacagcttcaccggaactttgatctggcagtttcccaggcggatcatccggaagtattcggcggacttccctccgaaggggaagggatgcgtcttgtcaggacaacggccggatggctgttaaagaatgggaaatggtatctgcttccggagcttgtgctccaaagcggatttaaatatattggataccggctgggaaaagcatataaaaaacttccggtccggctgattaaaaagcttacaatgaaccagtcgtactgggaataattgttggttactgtttgaagaaccgcgctttccagcaaagctgcgaataataataagcgttacattgacggaggaaaaaatggcagagctgctaattgtaatacccgcttataatgaggcagaaaatattgaacgcgtagtaaaccggctcataaaagagtttccgcagtatgactacgtgattgtaaacgacggttccagggatgagacggcggctatctgcaggcgcaatggctataatcttttggatctgccggttaatctgggacttgcaggcggttttcaggcagggcttaagtatgcggcccggtatggataccgttatgcggttcaactggacggagacggacagcacaggccggaatatattgcggcgatgaaagaaaaaatggacgagggctacgagatagtaatcggctcccgctttgtcggccagaagaaaccatttacgatgaggatgcttggtagcaacctgattgagaaagcaatccggatgacaaccggtgtggatatcaaggatccgacctccggaatgagaatgttcagcagcaggatgatagaggagttcgccaaaggactgaattacggaccggagccggatacagtttcctatctcattaaacagggggcaagaatcgcggaggttcccgttattatggacgagcgcctgttgggagccagctacctgaccccggtcaatgcatcccggtatatgatcaaaatgctgatatcaatcctgctgatacagaatttcaggaagagagggtgacggatgatgacgcttatgcttcggattgttttaattgttgtttctgtggcgaccacgattcttattatgaggcggatccgccagtccaaacttcagatagaggattccatcttctggattggtttttccttcatactgattttgttcagtatatttccgcagttaccggcgattctggcccggctggcggggacatatacgacagcgaactttattttcctgtcggtgattttcctgctgattgtaaaaatgttccatatgtcaattaagatgtcacagctggaaaccagggtaaaagaactggttcaggagatggctctggaggagaacaggagggcgcaggaggagaaggaaaagcggatagaacgggaatctggtgtttccgaacatgtttctgaataggttattgtgtatagcgcgccgctatgtgtgggtttttagatttagataagcaggtgaggacgccgccggtacggccagcggacgggtggggtggttttatgagtctttcgtcccgggggaagattgtcgtggtttggggctgcgggcgaagataaagtctgcggagcacgctcccgctctgtgaaatgcatcgcgctgctaagctcgacaggacctcgctaatcagcgatggatttaggcggcatccgcagactttatcttcccctccgcccccaaggtcaggttttcgccgggacgaaagactccgccaagtgtatcggccccgtccactggcctgcggccgctgaatgtctcacgcgttaagtgcggagggcggaccttgtcgcgggcactcagcgctaccgtgtacgggaaatacgatatgccttcaacgggcttaaaaaaaattgcggaagatttgatatcagtctgctggaaacacgttccggaagcgtcctccgggcctcagttaaatcattgggtgtaaacagtaacacgctgataaagccgttcatgttgactgaaacaactattgccaggttccaaaggtagtgatatagtattgcatagccggtaccgtacaggctgcccccggcttatggattgtgagacagcttatagatcagattaaaaggagagtaatcatgggaaaaattacagtaaccccttgtgatatagagggactttatgttatcgaaccaaccgtatttaaggatgagcgaggctattttgtagagacctataatcagaatgatttcagggaagcaggccttgatatggtgtttgtccaggacaaccagtcgatgtctgtaaaaggtgtgctcagggggcttcattaccagaaggaatttcctcagggcaagctggtccgagcagtccgcggtgaagtattcgacgtggctgtggatctgcgtaccggttcccggacatacggaaaatggttcggcgttgtgatttcagcggagaataaaaaacagttctatattccggaggggtttgcccacggcttcctggtactttcggatgaggcggagtttgcatacaaatgtaccgacttctaccatccgggcgatgaaggcgggctggcttacaacgatccggagatcggaatcgagtggccggttaccgagggcatggaactgattatttccgaaaaagataaaaaatggggcggttttaaggatacgtttaagttccagctttaaatccgcgctcctaaaattaataacagttcagacagcatgaactgttactgaaattaaccggaggttttcgatgagagaactgattacccttgttaaagggcttctaaagaaaagaaaattgattctggatctgtccaaagcagatttcagaaagagatttgtaggctcctatttcggcatcgtctggatgtttatccagccgatggttacgattgcgatatatgcgtttatttttggtgagcatggcatgaagaatgcaccgcctgttccgggagtatcctatgtcatttggctgactccgggtattattccctggttcttcttcagtgaggtgctgaatacggggaccaactgtcttcaggaataccattaccttgtcaaaaaggtggtgtttgaggtagagatgctgcctgttattaaattaatatcctgctttatggttcacgtctgctttcttgtaatcatgataggactttatctgatcagcggatatatgccgatgattacctggctgcagatactctattattcctttgccgcatccatgcttgggctggcgcttacattttttaccagcgcggttcaggtgttttttaaggatatggcccagatcgttggaatctgcctgcaattcggcatgtggctgacaccgattatgtatgatgaaaaaatctttaccgacagagcgccctggcttggaacggtgtttaagctcaatcccttttattacattgcggcaggctacagggacagtatgatgatgggaaactggttctttgaacgcccgacgatgacgctctacttctgggcggttacgctgatacttatgctgatcgggcttaagatgtttaaaaagctgcggccgcatttttcagatgtattgtaaagtgctctggcttcaataataattagagtaaatagtgagtgatgaaaatcctgtacctgaaaaacggtatgggatttttatattactgttcctaccttaattgaatattatgtggaaatctacacatcctcatggtacaatgaaactataagaaaacggtgtatttttaaaggaaggagtcggttttatggagaaattatttcatgtggcagaagaatatattaaagggatgaagtggcaggatatggcgcttctcaaaatctgcctctgcgccgcaggcattatcatcggaattacggctccgaagcggtggagaaaagggctgcttgcattggcggccgcagcgtttgttatcacctatattccgttgatggcaaaatttgttccggcgatgcgtaatctcggctgctgcggcgaagagtaacatgttttcacctgcgggcaccgaaagctgttcaatattttcagccgggagcagaaaaaacagagttacagataaaacggccatgcaggcttacaatagagcctgcatggccgttttggcggataccccgcctctttaccaatcagtccgcctctttgacggcctctttcatttctctgacatactccttcacataggggatacagtcctccccatattgtttacataatttgacaatggcacttccgacaatcactccgtcggcttttccggccatcgcttttgcctgctccggcgtggaaattccaaaaccgatggcgcaggggatatcctttgcctgtttgacgagtgataccatggcccccacgtcggttgtgatgttggagcgcacccctgtcacgcccagggatgatacgcagtaaacgaagccgccggcctccctggcaatggacgtaatgcggtcgtgggaggtgggtgcaatcagggaaacgagttccagcccgtatgttttgcagactgagccgaactcttccttttcttcaaatggcacgtcgggcaggatgaggccgttcattccgatttcggcggcagtgcggataaaacgttcttttccataggaaaagaccacattggcataggtcataaacaacaggggaatggaggttttttcccggatgcgtatcaccatctcaaagattttatcagttgtcacaccgccggagagggcgcgttcattggctccctggatgacggggccttccgctgtcgggtcggaaaagggaatgccaagctcaataagatcagccccggcttcctccatggcatagacaagctgttccgtgacagataacgacggatctccgcaggtgataaacgggataaatgcttttccggctgaaaatgcttcagcgattgatactttattcatggatatcctcccctctgtaacgggcaatggcagcgcagtctttatctccgcggcctgacagtgtgataacgataatctggtcttttcccatggcaggagctattttcctggcatgtgccacggcgtgggcgctctcaatggccggaatgattccctccaggcgggagaggtattcaaacgcatccactgcctcatcgtcggttaccggaacatattccgcccggccctgatcgtgcaggaaggcgtgctccggcccgatgcccgggtaatccagtccggcggaaatcgaataaacaggggcgatctggccgtattcatcctgacagaaatatgatttcatgccgtggaagatacccagcctgccggttgcgatggtagcggctgtttcagccgtgttaacgccgcgtcccgcagcttcacatccaatcaggcggactgattcatcctcaataaaatggtagaaggttccgatggcgttggagcctcctccgacacaggccatgacggcgtcaggcagcctgccttccagttccatgagctgttctttaatctctttggagatgaccgcctggaaatcgcggacaatcgttgggaaggggtgggggcccatgcaggagccgaggacataatgggtatccgcaatcctgctggtccactcgcgcattgtctcggatacggcgtccttcagggtggcggttccggtagtgaccgcgtggaccttagctccgagaagacgcattctgtagacgttcagggcctggcgctccgtatcctctttgcccatgtagacttcgcattccaagtccatcagggccgcggccgtggcggtggcgacaccgtgctgtcctgcgcctgtctcggcaataacacgtgttttgcccattttttttgccagcagaacctgccccagcacattgttgattttgtgggcgccggtatggtttaaatcctctctctttaaatagatttttgctccgcccagatcctcggtcatccgttttgcataatagaggcgggagggccttcctgcataattgttcaggagttcggtcagttcccggttgaatccgggatcatttttataatggttatatgcttcttccagttcgattactgcattcatcagagtttcaggcatatactggcctccgtgaatgccaaatcttccgtttgtcatgcttctgttctccttactgcggctactgccgccagaattttttctttgtcttttgccccgtctgtttccactccgctgctcatatccacgccccagggatgtatggtctttatagcctccgtcaaattatgaggccctaatcctccggccaggaagtacggccttttgatatggcgcaggagggaccagtcgaatacggttccggttccgcccgctccgttgtccagaagaatcaggtcggccgggcttttttccgcctgccggatggattccggcgaatcggcttgaaaggcttttatgacaggtatggtcaattctttcttcagacatcttatatagttttcatcctcaccgccgtggagctgtacagcgcctaatgcattgcaggcggacaatgaaataacggactccaaaggttcatttacaaaaacgccgacaggagtgatggactcatccagccggaaccggagttcatgcagcttcccgctatcgatgctgcgaatactttttggcacgtggatgataaatccgcagtaatcaggccgagcttcgttaatccagtcaatgtcggcggggcgggacaggccgcaaatctttatgctcgtcatcggaacgttcctctcagttcatccagcatggcttttttatcgggagaacgcatcagggcctctccgatcagaacggcgttcgtcccgtttgcatagagcttttcaatatcagccgcagtccggataccgctttctgagacaaagaggatttccggcggaaccagggaacgcatggcaatgctggtgtttaagtccacccggaatgtttttaaatcacggttatttacgccgataatggaggcgcccgctctgacggcccgttctatctcttcctctgtgtgcgcctcggtcagcacatccaggcggagggagacggcaagctccatatagctttttaactgcgcgtcatccagaatcgcgcagattaataggatagcggcagctccggcggcagcggcctggtaaaccatatattcgtcgacggtaaaatcttttttcagcaccggaatggcggcggtgctggcaatctgctttaagtaccggtcgctcccctgaaaataataaggttccgtcagacaggagatggcggctgccccggctgcctcgtattccccggctatctgaaggtatggaaaatcttctgcgattacgcctttggaaggtgatgctttttttacctcgcagataaaggacattcccggctttgccagcgcctggtaaaaggtggggcggttttgtctgccggtaccgaatgccgccaccgcttcggcgttatttctcatctcgaacaggggaatcttcctgcgctcttccctgattcgttcttttgttttttctgcaattgctgcaaggatattttcgttcattttgttctcccttaccgattgctttccctgataaattcttccagttttttctgtgcgctgccattgtcaatcagctgttcggccatccgcaccccatcctccagggattcggccctgccggtcacatacagggcggctccggcattgaggcagacggcgcagcgcttcggtcctctctccgcgccgcttaagatggcgcaggtgatggcggcattttcttccggagttccgcccgtcagctcctccttgccgcagcgggcgtatccgaactgttccggggtgatttcgtaggactggaaccatccgtcccggatttcgcagacggaggtggcagagctcatggaaatctcatcgagcttatcctgcccgtatacgaccattccgcgtgtgacgcccagctttgccataacctgggccagcggttccacgagggcctgctcatatacgcccatcagctccatattggcgcctgccgggttggaaagcggtccgaggatgttgaatacggtccggatgctcagctctttgcggatcggagcgacatacttcatcgcgatatggtaattttgggcaaacagaaagcagattccgattttcttcagaagctccgcgctctgttccggcgtgatgtcaatttttacgcccagcgcctccagcacatcggcggctccgcttttggaggatgctgccctgtttccgtgctttgccaccggcactcctccggccgcaatgaccagggaagcggtggtggagatattaaaggagtttgcgccgtctccgccggtgccgacaatctcaagtacatccatatcatggagcagcttgatacagtgggcgcgcattccggctgcggatgcggtaatttcgtcgatgttttcccctttgattgacagtgccgtcagataagccgccatctgtacctggcttgcctggccctccatgatttcattcataacctgctctgcctcttcataggacaggttctctttattggaaagtttgataattgcttcgcggatcataatgattaacctcctggaaaatatatatttatttaaataccgatttttagatactgctgccagttttcatatgccggtttcggccttcggaaatctttcctgccgattcgataagttgatagtttaataacacgattgtctaacaacccgatagttcaacaacccaataagtcaataactgttcagaaaattttgaatcatgagttttccctggggtgtcataatcgattccggatggaactggactccgtagaccgggaactccctgtgttccacggccattatttccccgtccatcgtacgggctgtaatgcggagcgtgccgggcagttcctcttccgaggcagccagagaatggtaccgggccacccggaccggggattccaaaccgcaaaacagggtgctgtctgcttctgtgtatatttcggatgtttttccgtgcatcagttccttggcgtaggtgacaacgcctccgagggccttgcagattgcctgatggccgagacatacgccgaggatgggcgtctttcctgtgaaatgacggattacttcaagaatattcccggcgtcctccggccggcccggccctggcgagatgacaatcgactccgggtgcatggcctctatctcttccacagtgcaggcgtcatttcgtatgaccttcagatcaggggtgatactgccaatcaattggtacaggttgtaaacaaagctgtcataattatcaatcagtaatatcataacaggcctccttccgctgccttcagggcattgacgactgcctttgccttgttgcagcattcttcaaattcacgttccggaacgctgtcggccacgataccggctccggactggatacatactcggccgtttttcttataggcgaggcggattgcaatgcaggtgtccatgttgccggtgaaatcgagatagccgatggcgcctccgtagatgcctctctttctgccctccagttctccgataatctcacaggcccgcagtttgggcgctccggagagcgttccggccgggaggatggaatcaatcgcatccacggcgtccctgtcgtttcggattgttcccgatacagtggagccgatgtgcataacgtgggagaaccgttcaatggaacagtatttatcaacttttaccgtgccaaggcggcatacccggcccaaatcgtttctgccgagatccaccagcatgttgtgttccgccagctctttttcatctgacaaaagctcccgctcaagagcttcatcctcctgtgcatctctgccccgcggccttgttccggccaaagggaaattatagagcgtttggttctgcagctttgccagcgtttccggggaggccccggcgatttccacatcgtcgctggaaaagtagaacatataaggggatgggtttgtggtgcgcagaacccggtaagtgtcaaagagacttccctctgcggccgcggtgagcggatcggagagaacgacctggaagatatcgccttcatgaatataatgtctggctttttctaccatcctgcaatactcttccttcgtaaaagcgggagtcagttcttccttgagcttcaggggacggaaagcggctttggccgaactgtaaagcaggcgctcggtttcatccagcttttcggcggcttccgcgtaggagcgctccggatcggcggcatccacaccggctatcagaatcagcttctgcttatagtggtcaaagacaataacccggtcaaacagcattaaatccacatcgcagaaatcatcgttttccaaatcctttttgcccagaaccggttcggcatatttaatgtaatcgtaggagaaatatcctacaagccccccggtaaaaggcggcatattttccagcttcggacttttgtattcctcgaggatccggcgtatcgcctcccccggatgaagtgtttcggatatggtctcctcttttatctcgtcctcatctccacggcggatgcgaagaacaccgtttctgcaggtcagttccagggaaggggagcagccgaggaaagaatagcgtccccatttcttattatcttctgcgctttccaaaagatagcagtggcggctggccgccctcagcgttctcattacttctattggggtgaagcaatcggagtaaatctcgcgtgcaacggggatacggcggtagacgccgctttctgcaattgttttcaaatcttcgattgttgggtacatagcaggcctcctgttctaaagaaatatcaataaatgccatatagctcataattatttttctgaaggacttcttctcactatgtaacaagaaagaatcctgcccgccgcagtgcgatccaccgcggagcggttttaatttaacaggaaaactttactgttaaattaaaaaaacccgtccttgacagaaaaatagaatctgtcaaggacgggtatcacagacccgcggtgccaccttgattcatggatcaaatccatgcgctttgcgagatactaacatatctccggcaactgacgtatgccccacgtcacagaatactcggcagcaacgctgcttttgactgtgccctcggcggtccatttggcaatctgcatttcgatccggttctcagcatcccggactctctgtgcgcgcataattactttgatctccgcttcatcggtttaagctaataaattgttattgtaaaatatactatgtttaaaatgatttgtcaattatttttttgagatttttaatgatatcagccgttactgttcacatggttatgtcccgcgaggtgttttcgtgcgttttctgcgcgaaaatcccgagttacacggcgcgaaactgcgttttatacagtttctgtgcatcgcgaagcgtgttattgtttacagcatgccgctttttggcatggtgtgaacagtaactatcagccgtaggtttcatggcattggctgcatccaggtaaaaccgggcagattgcgcaggatgccgaacaggagcagaatgacggtcatgccggccaggatccaggtctgaaaccgcgtcagccggccgtttccggtctttacatagcgcacggctgtctgaatggcaattgccagtccggccggcagcagcagaaagatggcggcattggccctgaaggccgatacaaagtccaggcgaaagagcgccagacacatgcggcttacaccgcatccgggacaatataaaccggttatctgatgaaacatgcagggaatcagggggcgtcccgccaaattacagattaataaataaaacagaccggctcctgcgagccagcctgtcctgatacaaagctttttaaaacggttacgcatccggcagatacttattcagctcatactgcaaaagagcataggctacgatgctgaagccaaacagactgagaagcagataaacaaccggcgcgctgccctaggctcaccgtgctgttcgtgcagcatctcgacagcatttcccatctgatacatccagaacagggagtagattccgcaggtgattagtgagaacagaaagactgtccctccgctggtgcctattcttccggacagagcattcgtctcgtcattcagtacaatcatccagtaaatcccatagattccgcatgttacaaaaagcagtaaaatacacaccgcaatattgcgctgtttcattggttagttcctccttggtacagtctttaaatacacggctttgattccgtcacaggaacggcggttaatcgccggagcctacagagtctgtgctctgtctttgatattctgatgaaaattgataatgtcgtgttcatattcctgatccataagactggacgtaatcatgaaatcagccgtcgccttattgttggctatggggatatcatatacctgagcaattctgagaagcgcctttacgtcgggatcatggggctgtgcggtaagagggtcggaaaaaaagatgataaaatcaatctgtccctccacaatcttagctccaatctgctggtcaccgcccagagggccgctgttatagccctttaccggaagacttgtatagtctgtgatcatcctggcggtggttcctgttccgcataaaaaatgcttcttcaggatctccttattctcctcgcaccagttaatcagctccttctttttattatcatgggcaattaatgctatatttttttgttttccgatagtcatcgttaaataatccatattaatcactctccttctcactgatttttacataaattggcataaatgtcaagaaaagcggtattattgcatgttttcactgtttatctgaaacaatcgttcagacgaaagactctgccgggggtatcggccccgtccgctggcctgcggccgctgaatgtctcacgcgttaagtgcgggggccggcctgccggaaacacgcagtggccgcgacagggccccccctcaccacaccggacatgatccgttccggacgcgtcctccgggcctcagttattaattataacattatattgtaaagtcagctgtttcagcatgtaaaagtatggtataatgatcgcatagcattatactgtgcaaaaaggtttctgcgtccaccgcaggatgaaaatcaggatacgattcagaatgaaggagacagatgtggataagccaggcataggcagccgtgccatattaagaaccgtcatatcggttgtctgtatttttgtaacgggaattcttcttttctatgcatataataatattacgaaaagcatgagcgcgagcaatctcagaagagtggcacagcagaacataactgtttatgatatgcgtttttcggataacaggagcatgctccgcaatatcagcgggactttaaaaatgtttaaccagatggacagagagcagctttctcgttatctggataaaaatgcggcggaaaaccatcttttcggcatctatctgatagacagtgagggatacatatccggaaaagatggggggcggaagaagattcagccttcctctgacttggaccgtctccttaaggagaaggaagatgtcttcagggtcggggtttttaatagttcggaggacgctgtttttgtaggtattcctgtggagccatatgaggtggcgggagtgcaggtagcggccgtagcaatggcatacagtaatgcctccctgtacgaaagtcttaatgaacagctttatgacggggcggcaactattatactggccgacgggtatggacatgcatttatgcgtaccgttggaaatatgtcacccggtgagacattctacagtgtggagacttattttggggaactgtcatttacaaacggaatcgtgctttcgaatataacagagcgggcaatacagggaaaaagcactaccgtatgggcaaaagacgggaaggtggaatactgtatcagcgtgcttccgtttaaaagcatggacggctatcagatttttatggtgccggcggaggtgattaaggcggcggtcagcgacaacctgagaaaagtgcttgttaactgcggaatgagccttgtccttgtagcgcttacgctcatttattttaatttatatacttacagacgtgataagggacaatatcttgagattatccgtgcaaaagaagaagccgaggctgccaacagggctaaaagcatgttcctttccaatatgtcacatgacatcaggacgccgatgaacgccattataggaatgacacggattgcacgggaaaatattggcgatggggaacgggtggaggactgcctgaagaagatagatatctcttccagactgctcttgggaataatcaatgatgtgcttgatatgtcaaagattgaagcgcggaaagtagaattggcaagggaagctttctcgatgggggccatgatcgattccaaccggatgattatggagagacaggcggagaacaagcagctgacactggaattcaaaaagacgaatctgaaccatgatgcagtcgtcggagattcggtccggctcagccagattatcatgaatattctgagcaatgcggtaaaatgcaccccggaaggcggaaggataacgtttgagattatagaactgccctgtacccgtgaagattccggccggtaccgtttcgtgatatccgacacaggggttgggatgtcggaggaattccagaagcatatttttgaaccttttacccaggaaaatgattatggaagatccagatataaaggaacaggacttggaatggccattacaaaaaaactggtggagctgatgggaggaaccgttgaagttgagagcagacagggggaagggactgttttcagagtggaattggaactgcccctggcttcccaggaggaggttcaaagcgggacgaaggagccggaggactccgtattccggtctcaggagcttttagacagtctggccgggaagcggtgcctcattgcggaagataatgagttgaatgcggagattgccgccgcgtttctggaaatggccgggattaagagtgagaaagcctcaaacggacaggaggcggttgaaatctataaaaggagggaaaccggattttttgatattatactgatggatatccggatgccggaaatggatggttatgaagcatgcaggcagatccggggagccggccggcgcgacagtctgaccataccgattgtggcaatgacggcaaatgcattcagtgaagacattgaactcgccggaaaaagcggaatgaatgcccatctggcaaagcctgttgatgcggagcagatgatatctttattaaaagaagtgctggcaggggagaagaacggttaagactgtttcttctcctttcgtattgcagaaaaaggtttgtccggagcaataaagatacttttaagataagctgtaacaaaactgccgtagagctgtcttacaggaaaaggaggagatatgaacaacagcgaatttgaactggtttatcaaaaatatgcaaaacagctcttctatttcctgctgaaattatgcggagactatgatatggcggaggatttggctcaggagacatttatgagagcatatcagagcatcgattccttcagaggcgactgcagactggacgtatggctctgccagataggaaagaatttgttttacaaccagcagcgccgggatgacaggctggctggttccgacggcatggagaaaatgccgggaaatgaaaatatagaagaagccacgatcagcagccatatggcaagggatgtgataaaacaggtgcggacggtaccggagccgtaccagacggttttcctgctgcggattattctggaatatgattataagaaaataggtgaatgttacggcaattcggacgtgtgggccagagtggtgttttaccgtgccaaaaacatgctgcagaaaagattaaaggaggaattgcattatgaagtgtgaaattatacgggatttgctccctctttatattgaaaatctgtgcagtgaagagagctgcagggaggtggaggcccatcttgcatcctgcggccggtgcagggcggaataccggaatatgacggctgaggttccggtagcggagacagacgaggaacgggttcagaaaattcttaaagaagcagatttatttattaacagtaaaaaagaggtggaacgctcttttgtggatcgtacactcagggtatttaatttaattgttttctgtctggcggcagtctgcaatgtcctggcagcggctgttgtaatatttggatacggattgagatatccatcagtttatctggattataaaggatttctccagatcttcattatactgtatgctctgtgtccgaccgtaataagcctggtcaacctttgcatcatgaaacggtatccgggacggaagaaaatactcacccgggtactttcaggcgtgctggttccggccgtactggcgggcctgatcggtacggtgtccctgtttttaatcccgccgttttgttccgccacatcccggataacggcttatatgaaagtcgataaggatgtggaggacagcgtacgggccgctgccgtttgctttccggctgccgttccggaggccgcagaggccgcggtttaccattacagtaaattttccacgctgtttgaagactcatgggagctggaggcggggtggaaccttccaaagcaggagtttgaaagtgagaaaaagcggatatcggaactccgcgccctaagccaaaagagtgagacgaaaagcggtacggagtatacggtttccggtatggtttatccggaaggagtttcagtgacggttatctttgatgatgctgcgggccggattgagtaccgggcgcatttcagcgggagtaagtaaaccgggccggcggttattttcacaaagaatttttgtggaaatagtaaaataatcttgttttaatttgtaaatacgacatgctataatcaatttgctgaaacatacaggaacattgagcttaggaatgttcaaatttaacagaaggcagacgtgccgatactatctgtattgttgttttgcgttgtaatgctgatcagcccaccggaaaaattgtaaaacttatctgaaagggaaatgttacatgaatagcatgttaatagcgttattgattcttgcggtcacgatcgcactgtttatctgggagccgattccaattgtagttacggccatcggcgcctccatcctgtatgcctatacgggaattatagaagtgaatacgattttcagcggttacaacagtactaccattgtgctgctggccggaatgatggtggtgggatcttccctgttccattccggcgtgactgatatcatcggagaaaagatggtaaaaattaccggaaaaagtgagaggaatattattctggcaacgcttatcgtgtcctgcgttctcagcgccgtatgcagcaatatcggcgttatggtggcaatggcgccgctcgttaccgcgatgtgtatctctgccggttacgggccgtcaaaggccctgctggcgctgttgttcggctcccagttcggaggatttgtcactctggtaggcgtaggttcaaacgcatcggcggccggtgtgatgcaggaactgggatatgaaccgtttggctttttctctatcacgccttttggaatcggaatctgcatcatcggaacgctcttctttgcctttgttggcagtaagatgctgccggataccggatatgttcctgaatttgcccagacggagaaaaaggaatttgataaaaagaaggctgtaatctgcggtcttaccatgttctgtgtgctggctgtgatagcctccggctctaaaaaggtgccgatgcatattgcggcggttgtgggagccctggtaattgtgggttccggctgtatgagtgtaaaggacgctgttaaggcaatcgactggaactgtctgattcttgtaggagccttaagcgctatctcttctggtatcaaggagtgcggcgcaggtgatgccgtcgccaatctgattatacggattctcggtgaacagcccagcgcattcatgatcagcacggtcatattctttgcggcggtacttttgacacaggttatgtccaatattccgacgatcctcgtatttatgccgattggcctctctattgccgaaaaaatcggcgtcagtccatatccgattgccatgattataactctggccggtgcggcttcctatgcaacgccctttgccgctccccagaatatgatgacggtcggctggacaaaatataagttcatggattttgtgaagattggtgtcccgatggtactgcttacctatgtggtcgtcgtggccctgattcccattttccttccatactagtcagacaggaggcatgagatgaaagagctgttaaatggggcctgggatttacattttcatacggctccggatgtcgttcccagaaaatatacggatctcgagctggcggaggaatggagcggcgccggtatgaagggaggcgtaatcaagtgccattatgccgataccacaggccgggctgcaatgcttcgttcgcttttcccgggacttaaggtgtacggagggctggtgctgaaccgtcaggcgggaggattgaacccggacgcggcggaacggatggcccaggccgggggaaaatatctctggtttcccaccatggattccctgagttacagaaaattccatcagggaggcggcacggatacggaactttcatcctgtattcaggtatgcgaggatggaggaaggctgcttcacggagcatatgatgtgctggatgtggcggccaggtacggcctgatagtcggaacgggccatgtgggtgagaaggaaggcgttatgctggtccgtgaggccgtccggcgcggtgtgaagaaggtggttttgacccatgccgaaaacccggctacccggttctcggccgaggccaggaaggaatgtataaagctgggagctttcgtggaacacagttgttttactgtttaccataaccggattagctgggaggagatgtctgcccagattagggaaaacgggccggaacacagcctgctggttactgatttcggacagttgaattcacccggttcggcaagaggccttacagaatttgcagaggggcttataaagcacgggattaagaaaacggagattgaaatgatgataaaggaaaacccggccgcccttatggaagcagattgaggaatgttcttggcggattcccatgtcccctctgcaattgatttggcctacttccccggttcaggtttttgccgggtccataagacgcaggcgaagattttcgcggcaccggacccggcccgcttctgacgctgattttaattccggtattcctcttccggccctaattccgctcatctatttaaacatcaaatcgattaaattcccaacaacaacactcaaacaacaacatcagtccatatctatcatacatccaacaatatctatcccatatagaaacgctcagcagccgcagtcccaacccacgacaatctcccccgggacgaaagactcatccaattaaattcaccaccccgtccgcttatttattttacggttccgatgcgctgaaatttttaccggtatgaaaatgggaaagactatgttataatataaccgattatacgcttttttggaggagaccatggcggctgaaaatgcaattgaaataaaagatgttacaaaaatataccggctgtatgaacaacccatcgaccgtttaaaggagtcactgaatatcggtaaaaaacaatatcaccgggatttctatgccctcagcaggatttctttttccgtggaaaagggacagaccgtcggaatcatcggaacgaacggttcgggcaaatcgaccatattaaagattattacaggagtcctgacgccgacatcgggcgaggtgatggtgaacggaaagatatcggcccttctggagctgggagccggttttaacatggattacaccgggattgagaatatttatatgaacggaaccatgatgggattttcacgcagggagatggaggataagcttcaggatattctggattttgccgatatcggagactttgtctatcagccggtaaagacgtattccagcggtatgtttgtgcgtcttgcctttgctcttgctatcaacgtggagccggaaattctgattgtcgatgaggcgctgtcggtcggcgatgtctttttccagtccaagtgctacagacggatggaagaaatacggaagaacggaacgacaattgtgatggttacccatgatatgggcagtattataaaatattgtgataaggttattctgttaaacagaggcgaatttattgccgaaggttctgccggcaagatggttgatatgtacaaaaaaatcctggccggtcagatggaggcgctgcgggaagagattaccaggatgaacgatttttcgggtgagaaggtcgtactggccgaggcaggcagcggggaaaccaaagcggaggataaagacagggctttagcaggcggccagacggcaggcccgtcgctgatgcgggataagctgaccattaatgccaaccgtgaggagtacggagacggaagggctgaaatctttgatatgggcctgattgatcagcgtggtaatatcacaaacctgcttttgaaaggcgaaatgttcacgattaaggaaaaaatcaggtttaaccaggagatacaggctcctatctttacgtacacaattaaggataagaagggcagcgatttaaccggtaccaataccttgtttgagggaacggatattaaaccggtgaaaaagggcgatgtctatgaggtgtccttcacacagaaaatgacgctccagggcggggaatacctgctgtccatgagctgtaccggctttgagaacggagagcatgtggtataccaccggctttatgatgtggcgaatattaccgtgatttccaacaagaatacggtaggcgtttacgatatggaaccggaagtggaagcacatctggtgcaagagtaaaatctgcaatgcatgaggaacttagatggaagagtggaagaagaatataaagaagaaccctaacggtgaaattctcgcgctgcttgataaatacggcaatgatacaaagagggctctgaaggaaaataaaaagctggaatatctctatgccctggctccgctgagagaaaatctgttagagtggtatgaattcagaaaaggcggccgactgcttcaggcgggcgctgattttggagcgcttaccggtctgtatctgcgtaaaaccggttcggtaacggttctcgatgagtccgaggaaagtttggaagtcgtaagacgcaggtatcggggagaaaccggccttcggctggaatgcgggagtctgactgcatacagcagacagaaggagaacagcggcagcttcgattatgtgctacttatcggccggccaaacggcagcgaaggcctgggcgcacagattgaggcggccaaacgtcttctggcgccgggcggaaccattattcttgccgtctgcaaccggttcggactcaaatatttcgccggtacgcagagagatgcggtgagcgcgaccaaaaagaatcttgatgaacttctggcagggggcagtttttactatccgatgccggattacaaactgccgtctgtcatttattcagatcggtatctgccgaaaaaaggcgatttgacgggaatgccggcgctttatgactacccggagtacctgctgatggatgtgggcgccgcttacgacgccgtatgtgaggacggccagtttgagaattttgcaaattccttcctcgtgatttggagcgctcataagaatgaaggagaatagacggcaatggcagagctaatatttgtaaaatataacaggacgaggcgggaaaaatttcagattaagacgcagattatggaagaagccggagtgcgttttgcagaaaagacagccctgtgcgaagagggaatcccccacatccgttcgtttgaggaaaaatataattttctgaccagccagaacgggagcctgtttctggtaaagccggagcttgttaaggacggcagaacggcccgttttgattacctgcagggaaagacgctggcggagcttctgggggaggaacttaattcaggagtgataatccctgcagtgaagaaaggcatggagcttatctatgacatccgtccggaatatatctcggatttccatgtaacgccggaattcatggaagtgttcggattgacgggtgaattgagttcggaggatgaggagcggcttaaatggcggacctcagacaggagggagccggagcagtcttacagagcctccaatatcgacgctctttttgaaaatatgctggtgacggaggatggtgtctatgccctggattatgaatgggtattcctgttcccggttccggccggttttgtgcgttacagaacactccattatttttacagacagtatcagagcctgataaacgggcagtttgaaaaccaggctcagttcctgaaggaattcgacattgatgagacgatgctcccgctttatgaaataatggagaggagcttccaggaatatgtccacggagagaaccagagaacgtaccaggaagatttcatggtggagaccaagacggtcgcagagctaaggcaggtggacggtgagcttatgcgggccaaagagcgcatcgaacagctcagggctgaaatctcggagaaggacaccgccctcaaaaaagtccaggaggtgcagcgcctgacgaataatcatgtggctaatcttgaggtgattattggcgatctgcgccgtgagatcggtgagatggggaaaacactgacctatttaaaccgccacgaagcgattatttttaaggtaagaaggaaaatcggacaggcatttaataaaatgtatccgaaggggaccagaaagcggaagattctgggttactgcaagaatactcttcttcacccggtaaagtacattggaatgtatacatccgaggagggaaaaaatagaatcaagggcgattttgagatcggagaagagtacctgcaatatggaaaactcatattcccgaaggcagacagcccggaagtatcgattgtgattcccgtttacaatcagatccattatacttatctctgccttgcatcgattctggagcatacaaaggatgtgagctatgagattgtgattgcggatgacgtttccggcgatgcgacggagcatctgggagaatttgccgaagggattacaatttgccggaatgaaacgaaccagggattcttaagaaactgtaaccatgcggccaaatctgcaaggggccggtatataatgtttttaaacaatgatacacaggtgacggagggctggctcagttcgctggtcagtctgattcagtcggatgactctatcggtatggtcggatccaagctggtttatccggacggccgtcttcaggaggcgggaggcatcatctggagcgacggttcgggatggaattacggccgtctggataatccggacaaggccgaatataattatgtaaaagatgtggactatatatcgggtgccgcgatactgctttccgctgaactgtggaaccggattggaggctttgacgaacggtttgctcctgcctactgtgaggattcggatctggcttttgaggtcagaaaggcgggatacagagtcgtctaccagccgctttccaaggtgattcattttgagggcgtctccaacggaacggatgtaaatggttccggcctgaaacggtaccaggtggagaacagcgaaaagctgaaagaaaaatggaaagaggaatttaagaagcagtgcgtgaataccggcagtccgaaccccttccgggccagggagagaagtatgggaaaaccgattatcctggtggtggatcattatgttccgacatttgataaagatgcagggtctaaaacaacgttccagtatctgaagatgtttttgaataaggggtatgcggtaaaatttttaggcgataattatcttcacgaggagccatataccacagtccttcagcagatgggaatcgaggttctgtacggacaggagtatctgaccggtatctgggactggcttgataaaaatggaaaagaaatcagcatcgcctatctgaaccgtcctcatatcgctgcaaaatatgtggattatatcgcagagcatacggatattaagattatttattatggccatgatctccattttatgagggaattcagggaatatgagctgaccggggatatagggaaaaaacgtgattccgaatactggaagtcgattgaattctcactgatgcataaggctgccgtatcctactatccgtctgttgtggaggaggaagcaatccatgatgtggatgagacggtaaatgtgaaggcaattaccgcctatgtgtacgatacgtttctggataatctgaatcaggactttgcaaagagggaaggacttttgtttgtcggaggatttgcccatccgccgaatgcggatgccgttctgtggtttgcaaaagaggtattcccgatgatccgggagaaactggatgtgaatttttatgtggtcggttccagggtgaccgatgaaatcaaagctttggagcagccgggaagcaaaattatcgtcaaggggtttgtttccgaggaggagctgtcggagctttaccggagctgccggattgtcatcgttccgctcagatatggagcaggcgtcaaaggaaaggtagtcgaggccatttataacggagcgccgatagtaaccacttctgtgggaagcgaagggattccgggtgtcgaagacgtgctgctggtggaggataaaccggaagatttcgccggggcggtagtgaagctttacggtgatgagaaacggcttgcacagcttagccaaaagacacaggagtacattaaagctcatttcagcgtggatgcggcatgggaagtgattcgggaagattttgaagtgtaacggtaaccgccgggccgatgtgaaggcaggacggggaaaaggcagataccaaaggagaatacggtgtctgctttttctgttgctgggaacaggcagcagctgtctcagccgaccgccaggagggaccggccgctggagcgtaaggcaaaaatagtcgagagcttttctttttatcactttataatgtcagacagggaggtgagagacatgcaggaacagattgatgcggtgcagcgtatgcaggactatatcggcagtcatctgacggaagagataacactggccgatttggcgggggtatcattattttccccgtggtattcctacaggctgtttacccgccagacaggtaccacaccggctgactatatccggcggatgcgtttgtcaaagtcggcgctgaagcttagggatgacgccggtaagattgccgatgtggcgttcgaaatgggctttggcagcgtggacggatatcagagggcatttttgcgggagtttggctgcaatcccggggactatgcagcaaatccggttcctttatatctttttacaccctacggcgttaaattcagatatattgaaaggagagcaggcatggaaaatttaaaaaatgtgtttattcaggtggttcagaaaccggagcgcagagtgataatcaagaggggcgtgaaagcctcggattattttgcttattgtgaggaggtcggatgcgatgtatgggggctgcttcagagcattaaatccatcagcggggaaccggtctgcctctggctcccgcgtaaatacattaaaccgggaacttcggaatatgttcagggagtcgaggttcctgctgattatgacggggccctgccggaaggttttgagattctggagctgccggctgcaaaatatatgatgttccagggcgagccgtttgcggaagaggattattgcctggcgattgaagaggtaaaagaggcgatcaggagatacgatccgtcggtaaccggatacaggtgggatgaagaaaatccgagaatccagcttgagccggtgggaagcagaggatatatagaaatgctggcggttaaataagcaggtgaggacgctgacggtacggccggcgtcctcacctgcttatttattgatgacggtgacctgtgcgcggagcatgcaggttatcgctgcgacagtccggacaggccagcgcatttgttgcgctgaccgtgaaaaagggcagcatagcgaactgttgctatgtaattactttaaggattttattttttcagagagctctttcaactgttcttcagaaggaatatactgtatcttcagggtctcaaggcagatatcaaaaccgcatttcttcagctcttcctcgatttgtccgttggcctgtccgccccagccgtaagaaccgaaggaaaatgcctgccggtttttcggggaaaggcccttcatatagcagagaaaggcagccacggtgggaagcatattgttgttgagagtaggcgagcccacggcgacatatttgcagtcaagaaggctgacaacgatatcggaaatatgggtctgcttcaaatcaaacagcttaaccggttctcccttttcggtaaacgcttcggctatggtctgagccatggtctctgtggagtgccacatgctgtcaaagacaatgagggcgccggcctccggtacgctgctgctccagtgttcataagcattcagaatatcggccacatggcttctccagataacgccgtgactcggcgcaatcatctccggttccatttcttttacaatcttccaggcacctgcggcctgttttccataacacatgataatatttgcataatattttttggcttcctgcatcgtttcacagaaatcagaatcgtcgtcaaaacgcgtgttagtgcagtaatgctgtccgaatgcatcattggagaaaagtatcttttcctccgggcaccaggttaccatattatccggccagtggagcatcggtgtggtgacaaaggagaggctgcgttttccgagactcaaagtatcgttgttctttacggccatataattgtgagggccgtagtgggcggtgagcccttttactccgctgggagcgcttgtaactaccgttgcgttcgggcaggcctccatcaaggccggcagagcgccggaatgatccatttccacatggttggaaatgatatagtcaatcctggaaggatcgatgatactgctgatgcgctccagaagctcccgggaaaacggggccttaacggtatcgatcaatgcaaccttttcatcaataatcagataggcattgtaggtggctccgcggttggtcgtatatccatggaaattacgcaggtgccagtctaaggccccacccagtaaatgccatctttaatctgaattgcgttcatatttggttcctccttgtcaattgtatgtggtgaaaagttcacttttcatcgcgtcgcgccgaaaacacctcgcgggacactacctgtgaacagtaacataaaaactgcattatatgtaatcattcatcaaagaaagtgtagtataaatggagaataaatgcaagatgaaaaatgttaatttattatcaacttatccggagccatctaagatttatcactcagatactctttcaaataagccgacagggacatgatgagagccaggttgggatggtttttcctggcaaccagcgtgatggtgtagggaaaaagattgtgctcaaacggcattatatcgaggtccgggaatttggggaggaatacatcggtaaaatatcccttgattgtaattcctgcgcagcgatcccggctgcaggtttcatacatatagagtgtatcgctgacacgcaggatctctttgggaagacagtgattatttttacagaattccgtaaaatcatggtaagccagatcattaatggacaggacaaaggactcctcctttaagtcctgcaattcggcatattcctcctgaagcgcaggatgttccttcggaagcagcaggacgcgctcctgggttttcagctcatactggtaatattcctttcccggtgtgtaatccgaaataattaaaatatccagctccttgttattcagaagttcgatactttgccggtaggtgtactcttcgacgtcataagagataagggggtaatctttaaaaaagtctttccacatggttttcgatatgaaataccggcacccggcgcccagaccgattttcaggcagccatagttctgacggacgaattcgttcatgtgcttttcaagcgttctcatctcccttagcgcaggctggcaggacacatagagttcctgtccaagcggcgttggaataacgcctttatggtttctgtaaaaaagctgtgcatttaattcctgttccagcgtggccagagcccggctcaatgcctgctgggagatgaaaagagaatccgctgctttaaaaaagctgccgctttcgtagaccttaacaaaatattctaactgccgtatgttcatatcttcacttctttctgatgaaagtcaaaactgccgctatgaggccattatctcatgttccttcaaggaacatggagtctccgacggaaaacagcgccggatttctgcggtaaacgcagaaaccgtttatgcgcagtataatgcccgctatgcggccattataccataactcccctgctaaatgctatgggttcgtcttctgccggtacagggagggaagccggagctgcttttcaccacaatcaacggcgtttttttcgtttctgcacatcgcgtagtgtgttattttcaacccccgccaaaagcggcgtgctgcggacaagcgggatactgcctgtgaacaggaatgccggatatacaacaaaaaggtgtaacagtgtaaaaaaaatactgtttttaattgaaatatgtttctgctaaaatgtagtcaagtaaaaagactgtaaataagtgataaaacgcattaaaatcaattaaaacccgggttgataataaaaagcaagaaaaaagattaaatgcacaatgacaggaggttgagatgaaaataacggatattacctatgactgtgtccaggttccttttccggaggaattccatcccacctggtatccgggaaaaacggaacaggggcaggtcatcttcgtagtccgtgtacacacggatgaagggataaccggctatgcaaatatggaggcgccccatggaatcctgaagctggtctgcgcaacgatggattatgcgaaagagatgataatcggcgactccccctttgatattgaaaaaatcatgtttaagctgcgcaatgtagcccgaatcgccaccagaccatgggtaatcgagaacgcctgctgggacattatcggaaaagcagcagggcttccggtctgtcagcttctgggagcctgccgtgaccggattccggtttatgcagcctgggggaaatccgttcgaatgaacagagaaaggaagatgccgggcggctcgttgaggagggatttaaagcagtaaaaatacgttttacccatgaaacgataagagaagatattgcaattgtagaggcagtcagggaagccgtcggggataagctggaaatcatggtggatgccaaccagggaaccgcctgtgaacggaacaataacggctttccctatgtctggagttatgagagggcgagggatacggcaagggaaatggagcggctgggctgcgcatggctggaggaaccgctctggagatataatttcgacgggctggcaaagctgaatgaagaagtggatattccgattgcgggcggcgaaattaatataggcatacctgattttaaaatcatgctggaaaaaggatgctatgagattttacagccaaactgtacgatgagtaccggaatcagttatatcaggaagatagcggccctggctgattcatacggaaagaccgtgaacccgcatgcttacataccgggtacgggagtgctgcagagcatgcatatggttgcgtcgattccgaactttacttggctcgaatacccatatgatccgccgacacttacgccgggtgcatttcaggggattctgtcggaaccttattttgttgaaaaagacggctgtattcctctgccgaagaagccgggatttgggattgagattgatgaagaactggtgaaaaagtacagcattctgcattaaaaccctgcgcatacgccggggagagcgggcagaaggcaaagccggagacatgccggcggacagttgatactgaagagcaacagtttatgctgtctgaaatttacactgaagagatgttatatttgtgaaatacaggaggaagggtatgaatattttacagcttatagttgtagttatggttttatatcttggggaatgctggctgtaggtttttatggcaaaaagtatgccaattcatttgaagattaccttacggcggcgaaacagggaacatttcttatggtctgcggatcctacatcggttcccatataggaaacggtattgtagtgggcggcgcggagtacggcgcgatttatggaatcggagggatttggtacggtgtcggttcggctttgggttatgttctttttgcttttgttttatcaaagagactttaccgttcggaacaactgacaatgtcggatattttaaatcaccggtacggagccagaatcaccggtactatttttgcagtgttcaatgctttggcggctatgagtattatggccggacagattattgcgggaaagaacctgttctcctatttcggaatgaatgcaacgctgggggcggcggctgtatgtattatcgtttttatctattcaacgatgtcgggccagtggggcgttttgatgacagacatgattcaggttgccgtgattttcttctgtacggtgatagtcttcggatgcatgttgtcacagggaggattgggcctgatgagagaagtccttccaagctctttttatgagctgataccttttgaaatagatacatgggttatgatgctgtttccgtccatgctgtacggcctgatttcgagtgcatctttccagagaaatatgtcttgtaaggatgaaaaaacggcatttcattccgcattttggggagctatgatcctgcttccatatgtggttcttccggtcatgattggtatgtacggcattgctttatacccggatgctgcgcctggaacgattttgttccatgttctgattgaggcattcccaccgctcgtagcggcccttatgattgcggcactgatggcagcagttatgtcaactgtggattcccagttaatctatgtgacgggttcatttaccaatgatatttataaagcatattttgacaagaatgccagcgagaaaaagctcaacaggattgcccatgctgcaacctttttaatcggcattatcgtgctttacctggcattgggggcaaagacgattatctccatgctgtcggcggcttatacctttatgtgtgccggaacgctggttatgtttgtcggcggaatattctggaaaaaggctacaaaggccggcgcaattgccagttccatcacaggcatgttatttgttatcctctacaaatattgcggagtgcagcttccggtctcctctattttcccgattctgccgtccctgattgcgtatatcattgtaagcctgatgacgcagccgaaggaggcagctaaacgataacctgcatgctccgtgaaatcattcatggataaactggatccggaaaaatggagcggaggcgggtaaagcagaagcgtgccggtaatctacattcttaccggcggccccgcttcccagtttgaagaggaaagcgtgaggatatgagagagatatttgagagaagaagtacccggaaatatcaggacaggccggttgagccggaaaaaataaggcttattctgcaggccggaatgtgtgcgccttcggccgggaatgagaagccgtggcattttgtggtggtggaggaacgggaggaactgataaaactatcaaagctccatccccacgcggctatgctgccggaagctgcctttgccgtgatcttgtgcgcagacccgtcacttcagaaatacaggtttgatttctggatccaggactgttctgcggcggcggaaaatatgcttctggaggctgagcatctggggattggagccgtatggctgggagtttacccgaacgaagaaagaattaaaacgatgaggccggtatttgatataccggatgagattgaaatattctgcctgctgtccttcggatatccggaatttaagaagacggcaaaggacaggtgggacgggagccgtgtacataacgggcggtggaaccaataagaagaaaaatcaggaggatatgaaaaatgagtcagacagatgtacttttatatgagaaaacaggaaaaataggccgggtgattatcaaccgcccgaaggccagaaatgcattcaaccaggagctggtggaaaatctgggcgaatttatcaagctggcggatcaggatccggacacgaacgtgattgtaatcagcgccgtgggtgataaggcattcagtgcaggctttgatattaaagaaagcatcggagaaccgattgtcgatgtgattccgagaagagagaatacggcgatggagctgaatacatggcgtgaggtgtggaagtgcaaaaagccggtcatagcatcggtacagggcttctgcatcggcggtggtctgcatctcgcctttatgtgcgatttgattattgcatcggaggacgcaaggtttggcgagccggaggttgcattttcgtatgttcccgacattctgatcgagccgtggaaacttccgatgaataaagcgaggcagcttctttatcttggcgaatacctgactgcggaagaactccgcgagtgcggagtggtaaataaggtggttccctttgaaaaactggaagaggagacgatgaaaatagccggacggcttgcggaaatgccttcggacacaatgatgatgcttaaatatcaggtaaacaagacctatgagattcagggaatggttaatgccatggattttgcggcggaaatattcagcctgtgccgtatcaaccaggcccagacacagaaagagtttaatgagattgtgaacagccagggactgaaggcggctctggattggaagaataaccataacagttaagacaggtaaactggagaaagataatggaacagacgtggaaagatatctataatagaaaactgattacggcggcacaggcggcggctatggtgcaaaacggcgacagcttctgcgccgtgacgagggagccgaagacgatcctccgggaactggggaaaagaaaagatttaaaaaacgtgacatattattgttctcaaaccaacttcctgggagagctgatgggacttcaaaatgaggtgaaggttttattgagcttcatggacggaatgaaccgggaattcgtggaagacggccgcgccgaatttgtcccctgtaatttttcaggatatggaaaactgtccgtgaagactttaaaatgcagaattgcaatgccctgtgtgtcaaagcctgataaaaacggatatgtctcaatgggaaatgcagccgacgggatgccggtgatctccacgcagacagaactcgccattgcggaaattaacccggagctgccgttcgtactcggcgccaatgtgaaacatatttcagaattcgactatattgtggagggggacggttatcctctcaatatcagggcaattgatgattcggaggacagcagggagatttaccaggcaatcggaggatatctttcagagctggtagaggacgaggcaacgatagaagtgggactgggacggctgaattcctccgccatgatgtatatggagccgaaaaaggacttgggggttcatacggaaatttacggcgacctgctgatggaactgacaaagagaggcattgtcaccaaccggaaaaaaacattgtatccgggtgtctctgtctgtgcgcagctggtgggttccagggaattgttcgatttcgccgacgggaaccagggactcaatatgaatagctgccagcaggtgttaaatcccggaattatcgcgcagaacagaaggatgacagcaattaataatgccgtacaggtggatttgctgggacaagccaactcggaatacctgaaaggaaaacagtattccggcatgggaggaatcgccgatttttcttcgggagccgcgctttgcccggacggaaagtccattgtggtcgtcgagtcggtaacaaaaaacggaaaatattccaagattgtgccgtccttcacacagggaacgccggtatctctgacacgtaccatggttgaatatgtcgtcactgagtacggagccgccgttctggcgggaaaaaccgtggaagagagggcaaaagagctgataagggtttcccatcccaaattcagggacgagctgacgttccaggcaaaagagatgggactgattgtataatactgaaaattgaattacgcttacatccccattactacagggtgtaaatagattgccggtttctactccccaaagagaaaccggcgttttttaaccggaaagttttcctgttaaataaaaaccgttccgcggagaatcccgaaaacagtaacggaacagctgccatgcattaaaatcaagttgcaaataaccctaaaaaacattatactggactaatatacattccagtataaaggaggtcatcatatggatcaaaaacctatgcggcgcgtggcggactccgcggtcacacagacacagattgtactaagcagccatatcaacggagccggacggctgttcggcggtcagctcatggagtggatcgatatcgtggcgggagttgtggcccgcaggcactctcactgcaaccagactactgcatcggtcgacaacctgcagtttaaagaggcggtccgtctgaatgacacgcttatcctgctgggcaagatcacatacgtcggacacacttccatggaggttcaggtagacagctatgtggaagatctggacggaacgagaaagctggttaataccgccttttttgttatggtcgccctcgatgaaaaagatcaccccgttcaggtaccggggcttatcctggagacagaagaagaaaaagcggcctgggaatcaggaaaacgccgcaatgagctgagaaagcagcgccggattgaaaaatattaaagtattggagaaaactctatcggccggctggaggtccactgcggcggtactatactgctttggtataagttaaatcataacgaggaggatacttcatgtcattcaaattaaaaacataccaggccccggattttacacagcccagtctgatgaacgccccggaggcaagactggaaccggcgccttttgataaagttgctccggacgggtatcacgccaccactatatttcccgagtattttaaggttgggagtcagtggctgctggcagaggaaagccgcatggactgcgtggcggtatttgagaatgggaaaatccatgtccgtgaattccgaaacttaaaaaagggtgacctggtattcaccgggaggaaagaagacggagaggaaggaatctttgtatatcctgacggcttcagggaactggggcaggacggcgtggaagcgccgggggaggcatttgctttccggcagagccggtcaagggaaacggcattttcgcgtgattatgataacatctatgaacttctggaatatgagaaggaacacggctatgtagtctgggtgctgggaccggcctgtgccttcgatgcggattcaagggcagccttctccaagctcgtgatgaatggctatgtggatgccctgctggccgggaatgcgctggccacccatgatctggaaggcgcctacttaaagacggccctcggtcaggacatctatacccagcatagttaccagggaggccattataatcatatcgatacgatcaataaggtaaaataccacggctcgattccggcctttatcgaaaaggaagggattgataacggcattatatatagctgtgtgaaaaaagaagttccctttgtcctggtgggttccatccgcgacgacggacctctgcctgaggtttatgcaaatgtatatgaagggcaggatgccatgagacgctgtgtcagcaaagcgacgacagtcatctgtatggcgacgaccctccactccgttgcaacgggcaatatgaccccgtctttccgtatgatgccggacgggacgatccgccaggtgtatttttatacggtggatatatccgagtttgcggtgaataagatgggagacagaggcagcctgtcggccaagagcatcgttaccaatgtccaggattttgtggtaaatgtgagtaaagggctgaagttgtaataaacgaattgcagcattccaataggagtggaatctatatgaaaggatagtcacatttgctttggtaggcgggtgactatttttttgtacctatcaaaagaaatacttgttcaaagtatgaacttatagtagactttagttattaaaaagtaacggagatataatatatggctaagcaatttaataatattaagatccttttcgtatgtctgggcaacatctgccgttccccgcttgcggagtacatcctccgcgacatggtgacaaaacgcggtgacagcgccggattttatatcgcatccgcagccaccagtacggaggagattggcaatccggtctatccgcctgccaggcggaaattacaggagcacggaatttcctgtgacggaaaacgggcagttcagttaaaaaagagtgattacgctgaatatgattatctgctgggaatggaagaacgcaatattatcaatatgaaacggatactcggcggagatccaaaaggaaaggtataccgtcttctcgatttttccgatcgtccgcgagacattgcggatccctggtacagcggtgattttgacacggcctatgaggatatcagggagggttgcgaagcatttctgaacttcctggagacagggaaataaacaggcggactagcaggtgaaacagcagaaacggacatattaactacacttttaacgtccggttctgctgttttaatggcggcggtctttagtataaatttatttgatattttttcattttccgccatagagtggccgtgcttatattaagttccacggctgtcttgattctgctcccgttattcctgcgcaggcattcctcgattctttgctgctcacagttgtttagagcctgactcagtgcgggcttatttttggccctggcaagcaattctgttttatcacagctttctgcctttatccgggttcccggtggctttgtattcaaatccgtttccatagcggtttccatcatatcgcagcccgcgccatttcctttggcggcagttatcccgtaaacgattccttccaaatcccctgcggatattacatctgtttcagccagagtcacaattcgttccagcaggttaaagagctgcctgatattgcccggataagagccgaagctgaggaggctgactgcatcttccctgaaatgaacgggataattcagctttttcagataagcctcaatcaggagggggatatcgccccgcctgttccggagcggcggaagcttaagctccagcacattcagccggtagagcagatcctcacggaacgctttttcacggaccagttctgagaggtctttattggttgcgctgataatccggatatcaaccggaatcacccggtcgtcgcccagcctgcagacctctttctcctgaagtacacgcagaagctttgcctgtacactcaaatccatttcccctatttcatctaaaaatacggttcccttgtgggccagttcgaaaatacccattttcccttcccggtttgcaccggtaaaagctccttttacatagccgaacagttcactttccagcaatgagtcgggcagggcggcgcagttaattgcgacaaatggttcctgtgcccgggaactccggttatgtatgctttgggcaaaaatttctttgccggtgcctgtctcacccgttattaagaccgcactctgtgaccgggcatatttttcagccagacggattgtgttttttatggcaggactgccgccgataatattgtgaaaggattttttcgccgcatatcctcttgcgttctggttcaggcgtaactgcttctccgcggactgaatgctgttttcactggaaataataattacaatactttttacctttttatttacgaccaccggcagatattccgcaatgtaatttttagagccgatgcgtataattctttcctggctgtgtaccggcttaagttcaatattggcccttctgcgctccaggctgatatagtcaccggcactgtctgaaaagagaagctcttttatctgttccgtgttaaactcctgaaaaagtaagcctgctttctcattggaaaagagcaggttcccggccgtatcatagttcagaacagcgcttgaaattcggttaaccgtggcggatattacgctcagatattcatccttatgctccatggcggtcaggatattcagcgcgctgtcgatagcgagggatacattgcacggatcaaccataagcggaatgtttttaagactgtgcagtctggcggcgcgttttacggaaaatcctccaataagggcttttgtaccagggcgcaattcccgcagaatatcattttccgtagtggcaggcgaatcaggcccgatcacctgaatgtcctgtccggaaatatccttgaacctgttcataatctgaaatgccttatcaaatcccaccagcgctacctcgccgggagggaaaccggtggcctttacagagtggtaaatttcttcatagagataagggacgtcaatgatgggaatggttatatttttctgtaataggctggtatttcttcctcgggagataaagatacggctgcccgccctaaccagtttttctgcgtattggagagtccggtttccggtcgcctccacaatgccgatatggtttgaaagcgcccgttcctgaattaactcagcggcggctgaggcaaaagcctcggaaggagcaaatatgacaatatctttaacagtatccatgtactttcctttctgtacgggcgaatttacataattgctgcaataacgagctgccggaacaggtacggcagaagaatttcataaatgatattacgaagtgaaatatacatttcattattgaaatgtattttgttttagtataaatattaccatcaggtgtgtaaattaagaaaccgttaagagtgcggcttcatttatatcaggcactggattaccggcccggcaaaacccctcaaaaatctcaaaattatcaggtgattccgcaattaccatctcatctgatatatatctgatacgtttggattaaaattggcacgcatcttgctcattatatggtcagaaagaataaaaaataataacaggaggacagatgtatggggtacaaagtattgcttccacagccaatactggaatcaggcagagcgtatctgctggaacggggatatgaactggtggatgggaacggttttgaggaagaggatatcatccgggatataaagggatgcgacgccatgattgtgaggacggctaaaatcaccagacggataatcgcggcggcggaccggctgaaggtgatagcgcgacatggagccggctatgacggcgtggatttggaggctgcaaaagaaaaagggattatggttctatacgcgcccagggcaaacagcgaatctgttgcagagctggcggttttttacatgctttactgttccagaaatttcaaactggtccagaagctttataaggacgattaccgttttgctaaattcaatatcgaaaaacatgaactgtgcggaaaaaccctcggactcgtgggtgtcggcaacataggcggtcttgtggccagaaaagcagcgcttggatttgacatgaaggttctggcctttgatccttatgcaaaagaattgccggattatattatacctgtatccagccgtgaagaagtgtttgagaaagctgactacgtctcactccacgttcccgcaacgcctgaaactgtgaacagcgtgggggagaaagagctggcagggatgaaaaagacggcatttcttatcaatacggcccgggggagcatcattgatgaggaagcgctgataaaagcccttgaagagaaacagatagcgggggcagccctcgatgtcacccgggaagaacctttttccagggaaaatccgctgctggagatggataatgtactgaccgcgccgcacattggcgctgcaacgaaagaggcttcttcccgctcgtcactggcctgtgcggagggtattgacgattttctgtcgggaagaacccccaaatatccggttccgccgatgagggagcagttggagcaaatgaattttataaaataaatatcaggaaagaagaggagagacagaatgagtgtaggaaacagagtgtttttaaaaagaaatcttccggagagcagtattgttgaggcgtttaaacaacttccggcggctaatgtggcggataccatggggcgctcctgtgccctgaattcggaaatccgactgatcagctcaccggaccttccaatcatggcaggtgcagccctcacggtgaaagcccggccaggtgataatctgatgcttcacaaggcgcttgacatggccggagaaggcgatgtcatcgtggtctccaatgacggagacagaacgcattccctgatgggggaaatcatggcggtgtatgcacagcatacaagaaaaatagcagggattgtgctggatggtccaatccgtgatattgaagagctctcccggatgcatatgttcttatatgccaccggttcgacgcccggcggtccgtacaaagaagggccggggaagtaaatgttccggtatcaatcggtaatatagccgtaatgcctggcgatattgttctcggagacagggacggagtgattgtaataccgagaaaagatgtggcggttattctggaggaagccaaaaagtatgcggctcttgatgccggaaaggtagaagcagctaaaaacggcacatcaaagcgccagtgggttgaggatacgctggtgaaaaaacaggtggagatgattgatgatatttacagagccgactgaccggctttgtgattaaacacagcggtttaaattcacggggaaggggatgagcatatgggaccaggtttagcttcaatgctggtatttatcttacttattttaatttggagtgtatacataaaacgtaatattggagaggttgcctttatcggcatgatcgttgtatcgctgtttggcggaagcagggcggcagagcttctgctcggaggaattaaatatgcgctgagttatgaggtattgtttgcctctctggcatttgtattcatgtcatttttacttcagagcaccagtgttcttcagggaatgctgaagattttcaaccgcctgttcagaaagatgaagggaggtcccgcctatgtaaatacggcgatttcatcttttctgggaatgttgtcgggaggaaacactcccaacgccgccacgtcaggagcatttacggcacagtggctcttatcgacaggctggaaaagagagcaggccgccacgctgatagcagccaacggaggcctgggagccggtttcccgcctagttcctctctgtttattgttctggcatttccgaccgtagcgggcgctgtttccgaggggcagctttacattgctttatttttgaccggtatttatcaggttatttggagagtcgtttatattcattatattatcagaaaaaatcatatagtacttcctgagacggtaacggatgagccatggagcagcgttatgaagacggctggaaagaatcttctgctgttcctgggggcaatcattccggtagccctcaatatggggccgttgtctgatttgattgcgggccgctccgaggtatggaaagcggcagttgacagtattaatatactggtttggataccgattctgatgatcgcaatcattctggctctggggtggaaggatatccgggaaaaatttcattccagggagcagtttgtggaagaattaattcctcatttttccagtacaggcggtcttttgatatttgtctttgcggcaagcaatattatcagtaagctgggcctctctgaagatattgtacagattttaaattccatgagcctgtcaaaagttgcaacagttgttatcatattgatcctggtggcagtagttgccggtcctctgtcttccacggcaacactcacgtcgattggagttatctcccatgcgattttagtatctgtgggtatcgatccgcttgcagcggctactgctattctcgttgtggcatccacagagggagcttcaccgcctgcgtcgggagcgctgtttgtggcctgcggcctgacggaatgcgacccgccgaagatatttatgccgcttatcaaatggtttgttctgccaatcacctgtattgcagttttggtatgcctcggtatattaccgctgccgcgttaaggagggcttatgaaaaaattatattataatcttattttaatcggttttcttatcttttttctgggtggatgcatttacgtggcgggccagattgtctgtctgctcattggacagccggaaattatgatctcattagagggagtcacgaaggtgatattcccggcggcatcgatcagcggtcttctttgctttttaaatcagtatctgttcgcgaaacaaccaaaaaaagaagggaaacgtaagtagccgatccatgtaaaacagagtttatgcaattttctgccaaaaatgtcagaaaatcgtaatgcattttttatacaaatagattgacagctgtatatatactgtgtataattaacatacacagtatatatacagctgttttgctgagttattttttgacgtaatacgcgaagcggcaagcactgcaggagaaataacggtatgaatattattataagtaattccggcgataagccgatttatgagcagattacaagccagattaagaatgcaattatttcaggagaattggaagcaggggccccgcttccgtcactccgctatctggctaaggaattgcgggtcagccttatttccacgaaacgggcttatgaagaattggagaaagacggttttatcgaatccgttcaggggaaaggcagctttgtcacaggaaagaataaggaactgatgaaggaagaacagtttaagaagattgaagaatgcctgcaggaggcggtggacatggcgaggattgcccacattccctgcgaagagcttaaggatgtattggcagccatgtacgatgagggttagccggtttaggagccgatatctgcaaagagagtcagagacgaaacaggacacgagtcagtaggcaatgaatataggagttaataggtgatgaatatggaagagagagaaaataatattctggaaatcagaggcctgacaaaacattacagtgatttcaccctccaggatctgaacctggaactgccatacggctgcattatggggctgatgggtgagaatggcgcaggaaagagcacaacgattaaggcagcgttaaatttaatccaccgggacgggggaacgatccggatgttcggtgaagacataggcgaggataattccaggctgagggagaacatcggaatcgtcatggaaggactgaatcttcctgatctgtttaaggcggtggaagtggacagcatgatgagggggatatacaggaactgggacagtgattgcttttatcaatatttggaaaagtttcatataaaccgcaaaaagaaaattaaagaatattccagaggaatgaagataaagcttgccctgtccatcgcactttcccacaatgcagggctgctgattctcgacgaacctacaagcggtctcgacccggttgtaagggaggaagtgcttgatattttgaaagagtttgtcatggacgagagccattctgtgttaatttcatcccacattatcagtgatattgagaagacggcagattacgctgccttcattcaccagggaaggctgatgctctgtgaggaaaaggaccgtctgctggatgaatacagaattttaaaaggcagccgcagtgatatcatgaaaatggaggcagacggcggtgtccgggtggcaggaatgcgggagaacagctttggtgcggaagctctggttaagacgaacagtcctgtcaaatcaaaagaagggattgtggtggaagcggcatccctggaagaaatcatgctttttctgataaagtccgaagacagaagctgcggtaatgcggcagtgtattgagaaaacggttctgcgggccgtccgtgacggcacagtgaatgagagaaaggggttttattatgaaaggtttactctataaggagttttgtatgtttaagccgcagtttaaaagctgggccttcgtcttaatattttttatcatatacggtattatctttaagaacgtatatatgattacgatgatgatatccgtgctggggcttgtgtcttgtttcagctcattcagttatgataagcagtaccggtgcgatgaatatctggccgcgatgccggtgagcaggaagcagcttgtatggtctaaatatatttttgtgctgtgtctggatctgatattggcggcagcagcctttgttctggcggcaggatatgcagtctgggcaggggaacctctggtggagctgcttgctggcgtgggcagcgcactggtggtaactgtgctgatgcaggcaattttgctgccgatggtctatataatagggattgataaagcgagatatgtaaacattgtcatctggatggtaccctgggtagtgattatgctgtttcgtgacaggctgccccagattcagaaggagcagataatcatgatgctgaaaatcattccggttattgcagttgttctgatggtggtttcagtctgtatctcagtatcggtatttagaaagaaagatttataatagatgtttaaaagattgagcggaattaaggccggaagagtatcgccggatttaattccgctcaatttcgtgtgaaatacacacgaaaacacctcgcaaaacattaccccgtgaaaagttacgatgtgttctccatccttcaattaattttaataaaagttcttgacatctcagcaaaagagtcatattatatgcatatgaacaatcgttcatatgtatattcgataatatgtattacaatacagtttaagaggagacagataatgtaacagttcatccatgatgtattccgcgaggtgttttcgctgttttttgcgaaaatcccgagttgtgcgtcgtgacgcgatgaaaaatgaacttttcaccacaatcaacggcgtttttttgccgtttctgtgcatcatttgttacggtttagccgaaggctgaactgtaaccagataataaatgaaaggaggcctgcaaattggcaattcatgacgtagagtgctgtgacttttatcagatccatgacgatgtggtaaaggcagttaaggaaaagatgccggatgatgatgatttatatgatctggcggagatattcaaggtttttggcgattcgacgagaataaagattttgtatgtgctttttgaggcggagatgtgtgtgtgtgatattgcacagcttttgaatatgacacagtcggctatttcacatcagctccgtatcctgaaacagtcaaagcttgtgaagaacaggagagaggggaaagcagttttttattccctggcagatggtcatgtgagaagtattattgatcagggatatgaacatatcaaggagtaggacagcagttaagttcggagttttattgatggcagacagcaagttcatgttatctgaactatcatgaatttataaagataatggaggaataataagatgaagaagaaatttaaattaacagatctggattgtgcaaactgtgcagctaagatggaggaagcgattaagaaaattgaaggtgttgccgatgccaatgtcagctttatgacacagaagatgacaattgacgccgatgagaaccgtttcgacgagattatgaaggaagtagtcgcggtttgcaggaaagtagaaccggattgcgttatcaatatataaatcaggaaagacagcaggaggcagcatgaacaaaaagcagaaagcaatgctggcaagaatcattgtggcttttattatatacattcttgccataatcagcgagaaatcaggcgttctggagaatttttccggcatatggcccaaattaatcgtattcctggtaccgtatctgattatcggctgggatattatctataaagcgggaagaggaatcattaacggtcaggtttttgatgagaatttcctgatgacaattgctacattcggagcattcggcgtgaaggaatattcggaagccgttgcagtgatgctcttttatcaggtgggtgagctgttccagaattacgcggttaaccgctccagacagtctatcagcgatatgatggatatctgccctgagtatgccaatatcgagcaggacggccagttaaagcaggtggaaccggacgatgtggcggtcggtgatatcattattgtaaaggctggcgagaggatacctctggatggtgtggtaatcagcggcgaatcaatgattgacacttccgccctgaccggggaatcggttccgaggtctgcaagagagggaacccaggtaatcagcggatgtgttaacggaagcgggctgctgaagatagaagtgacaaaagagtttgaggattccacggtgtccagaattctggagctggtggaaaatgccagcagcaagaaggcgaaggtggagaatttcattacacgttttgccagatattatacgccgcttgtggtgattgcggctgtgcttctggcggttgttcctcctcttgttctgggccagggattcgcaagctggattcagcgggcctgtattttcctcgttatctcttgtccgtgcgcacttgttatatcagttccgcttagctttttcggaggcatcggggcagcgtccaggaacggtgtccttgtaaaaggaagcaatttcctggaagctctggcagagatagacactattgtgtttgataagacgggaaccctgacaaagggagaatttaaggtgacaaagctgtacccgtccggtatcagcgaagaagaactactggaactggccgcactggccgagaattattccaaccatccgatcgctgcttccattaaagatgcgtatgctaatgagatcgacataaaccggctgggagaaactgaagaaatttccggtcacggcgtcaagacggtgatagatgggaaagcggtgctggcaggcaacgggaaactgatggagcaggcgggaattccgtatcaggaatgcaaagaggccggaactgtcatttacgtggcaagggaaggcgtgtttgccggaagcgtactgatctccgatacgattaaagaagaaagctttgaagcgatccggcgtctgaaggcggtaggcgtgagaaagacagtcatgctgaccggagacagaaaagaggtgggagaagccgttgcaaaagaaatcggtctggacggagtctatacggagctgcttcccggagataaggtggataaagtagagatgcttttagagcctctggatgagaagcgcaaactggcttttgtcggtgacggaatcaacgatgcaccggtactgaccagggccgatatcggaatcgccatgggaagcatgggttctgacgctgccatagaggcagccgacgtagttctgatggacgataacccggcaaagattgccactgtagtcaagattgccagaaagacgcttaagattgtaaaacagaacatcgtgtttgccctggccgtcaaagccctggttctcatactgggagcagccggaatggcaaatatgtgggaagcggtatttgcagacgtgggagtttcggtaattgcgatactgaatgcgatgcgggcgcttaaaacagaagattgaggtaaggcgtccgggaataaatcccgggcgccttttgtatggtagtttgacagcttgcaaattattagattaccattctttatggtaaacggtttcaccatttttaatcacagtctccaccagattgatggtggtgtgatatggcatatagttgatggaaggatatttcaggaagataatatccgcctttttgccttcttcaatactgccaatctgatcggctctgtcaactgcggcagctccgttaatggtgagtgcggtgataacctcttcgatggacatattcatatagatacatccaagggctacgagaagaggaatattgttggtgaagcagcttcccggatttagatcagaggcaatggcgactgcgcagccgctgtcgatcatctttcttgccggtgcatattcttccttcaggcagaatgccgtggcaggaagaagggtgctgatgacacttgattcggccatctgccggatgccctcgtcggatgcctttaacaggtggtctgccgagaaacagccggttctggaagccagttcggctccgccgagggaaaacatctcatcggcatggattttcagcttgaatcccatctcttttgctttatttaagtaatactcggaatcttcgatgttgaaaacacctttctcacagaagatgtcggcaaattcagccaaatcctccgctttaaccttcggcattacttcattgatcatcatgtcgataaattcacgctccttgcccttgtactgcggaagaacactgtgcggtccaaggaaggtggtcacaatatcgacaggatggattttatcaagttctttcatggcgcggagctgttttaactctgtttcacagtccatgccgtatccgctcttgccctcaacggtggtaacgccgaattccagcatgcggttcaggcgctcgcggcctacggcaacgagctcttcttccgttgcattcttggtaggattgatggtagcgttgattccgccgccgcgctccatgatggacatgtagctgtcgccctttaaacgccaggtaaattcatcggcgcggtaaccgccgaatacaaagtgggtatgtgagtcaacgaagccggggagtacggtttttcccgtggcatcgataatttcatattcatccggattgatcatcttatccagttcttccgttgtgccgacagcgaagattttatcatcatggatcaggacgccgccgtcctcaatcaggccgatgtcggacatttctttgccgcgtttcggagcctgtcccttacaggtcaccagctcagatgcgtggcggatatatctctttgtcatattaaacctctctcattctctcatgattgcagcagtttacctaccgcggatttaatcagcagatatttgttactatatatcttatagaggctgttgcagataaacaacagcctctatagaaatgatatcgtgtcaaaaattattcccggattatgccggatttattattttgcagttgcttctttgaaaaccttctcaatcagagcgtcatcagcgatatatggcattgtgatggcatcgcttccttcgaaagtcttgttgtactcggcaacagtttcgatagaatgctcatttctggcccagtttcttctggaaacgccgaccatggtatcccacggaatagactcgcggataatctggtctgtcagttcggaaccgtcaagaacgagaccgaaaccgccgttgatagctttaccgatacctgtaccgccgccgttgtggagagcgattaagctcatgcctcttgcagcgttgcctgcgaagcagtgggtagccatgtcagccgtgaagttggaaccatcgtaaatgttggatgtctcacggtatggagaatcggttccgcctgtatcatggtggtcacgtccaagcataaccggtccgatttcaccttttcttaccatatcattgaacttaagggcgatatcgcgtcttccaagggcatcctgataaaggatacggcactgggtaccaacaacgagtttattcttctctgcgtcgcggatccatacccagttgtcacgatcctggaatcttctgttcggatcgatgatgtccatagctgcgtggtctgtcttaaccagatcttcgtgtttgccggataaacagcaccatctgaatggtccatatccgtagtcgaataattccggtcctaaaatatcttctacataagatgggaagataaagccttcgcttgtatctacgccgttcttagagatgtctttgttacctgcatcgtatacggccttcatgaatgcgttgccgtaatcgaagaagtaagaacctctggaaaccagagtctgaattaagtggaaatgctttgtcagagtttcgtctaccagtttgcagaatttctccttatcatggtcaagcatttctgttctctgctcaaaggtaagaccctgtgggcagtatccgccgtcgtatggaacgtggcaggatgtctggtcggagagaagctcaatgtggatattgttgtcaaccgcatattccagaaggtcaacgatgttgccgtggaatgcgatggacatagcttctttcttctccatgtattcatgagccagtttgaaagcttcttccggggattcagcaactaagcttacccagccctggctgtgacgtgtttcgattctggagtagtcaacctcggcaacgataccaacgccgcctgcgatctcgatagcttttggctgagcgccgctcatgccgccgagtccgcttgttacgaataagtggcctgccagatcaccgtctgccggaacgccaaggaatttacgtcctgcatttaagatggtgttgaatgtaccgtgaacgataccctgcggtccgatgtacatccagccgccggctgtcatctgtccgtaggaggagcatcccatagcagttgcctttgcccatgtctcaggattgtcgccttcgccgaccatcagaccgttggtgatgatgacacgcggagcctgtttgtgggaatggaacagtccgagaggatggccggacataacaacaagggtctgctcatctgtcagaacctcaagatattttttaagtaactgatactgcatccagttctggcaaacctgtcctgtctcgccgtaagtaaccagctcataaggataaagagcgatctcatggcttaagttgttgtcgatcataacctggaatgctttaccctgaatacagtttcctttgtattcgtcgattggttttccgtggatttctccctttggcataaaacggtatccgtagatacgtccatgtgtaagaagctcttccataaattcaggagcaagctgctcatgaagctcttccgggatataacggagcgcgttctttacagccagtttcttctcgtgatctgataaggtaagctctctcataggagcgcggcggatgccttctttaaaaacgggatactccggcagtaccggatcaagtttaattgtcatagcttttccgatttcactattgttcattgttatctcgtcctttctgtgtttcgtttttttactttctgagcctattataacagggcagagtccaaaaaacgtcaatattaattgataattttgtcctttatagaaaaattccagccaatcttctttggacgtcggagatttaagtgagaatggggacgcgtccggaacggaccatgtcctgtgtggtgagggggcgggctgagtcttccatccccgtgggaggttggtcgcgtaggggaatccggccggaatgaattgctgcggggaccgtttgcactctttggagtgcgaggcagtgctaagctcgtgagggacctcgctaagcaccggcggcgtcctcacctgcttaactaaatctaaagtctgaactgctacgtcagagttgacagtacacgccatgttttgtatactgaaacatatatagaacatagtagaaacccgcatttggcggcagagtctttcggagtactgtttaccggcatatccttccgggagaatgttcaggacagttattctttttgacggacagcggcggtttgggcagtaaagtaacagagtcaggggaggcgcaatgaaaaaagttgaaattaacctgtgtggaaatccgacgatttttgcagatggggagaaggttaattttccttataaaaaagtagagggatttttatattatctgtgtatcagaaaaacggtcaccagggaggaggttatctgtcttctctggggagatgaagacgagacaaccgggaaaaagaagctgcgtgacgcggtttatcaggtgcgccggtttatagataaagattttctggttacaaccggacatacggggatagcacttaatcctgactatcccgttatgattgatctggagcgccgtgaggatggtgatgtcggacagagcggtgtttttttggaccatttttatattaagaactgttatgaatttgaggaatgggtggagggagtccgcgaaggacagcgccagaatatctcaaagagcgccagggagcatcttgacgatgcgcgcgagaaaaatgatctttccctgattcagaagtacagtaatatccttattaaaaatgatccttacaatgaggagctgtattatgagattatgaatgtctatgctgagaacggcaattacacgatggcgatccgcctttattatgatctgatgaagctgttccaggatgatctggatatggaaccgtcacagaaggttaaagatctgttccaccgtgtatttaatgtgaaagagcatgtgaagacggaaggcgtttccgttgatttgccgtttatcggccgtaaaaaagaattatacgaaatcagcggatttttagagaggactgcaggcgagaaggttggatgtctggctgtagagggggaggaaggcgtcggaaaaacgtcctttctggaatgcggactgaagctggcgctggggaaacagatgatcacgctctatgcggtatgctacaggcagggcgccgatttcttcttaaacccctggaatgatatctttcaggaagtcagacaatgtattgagaacgggacaatgaagggggcgctgtctcccgatgaggaagaaaagctttcccagctcctgaaccggggtgtcggtgacgacagagagagcggccgtcttacttaccagatgattgagaagacggtaatcagcctgtttaccgagattacgaagaaataccggatagtcctggcatttgacgatatccagtggatggatcagatgagctttcagctcatgtgccgcctccagtttatgcttgaaccggatgtgctgctgaccatatgcacgtataacagaagcagcgaggccgaggtgacggaagcgctggaaccgctggtccgcagagattctgtcaaactcatagccctccagccgtttacgaaggaagaaacggatgaaattctgcacaaatcattaccggagcttgacacggaaccggagaaacgtcaaaaattatatgagctgacggacggtaacgcatttttcctgacggaaatgattaacattatccgtgagaagggatacacgcttgaaaaatctccgaagacaaactttgtaatcaaggcgaggctgtccggaatatcccaggatgagaaggaagtcctggactgtatgtcggtcttccctgagaagataagtattgaggaaatagagcttttgatgaagggcatggacaggctgacccttcttaaaattctggaaaggctgcaggaaggcttccttattaaagaggttctggttggatggaatgtctattataaatttgtccaccgcattttccaggaatatatttacgagaaacagagcaatgggaaaaagcagctttatcacaaaatgctggctgcctattatgaggcccaggcggaacaggattttaccgtacttccccttgtcgtctaccattacgacaaatgccatgatcaggtaaaggcataccagtatcagattcgttacctgaaagaattttacacggtaatcaatgagaattttccggtactccataccgaagcttctgatttcggcgacgatttcggtgtcatggccgaagcggcaaagatgcttgaactggcggaggacgtcattaacctgaaagacgattccagagagatacgccagatgaagatggagatgcattatataaaaggaagatatgacatcgcgatgggcgattacgacagcggtatcgccaatattgagaaaagtatttttctggcccagaagctgaatgcccataagaatcttctggcctgctataagcagcaggtatttcatggaattcagagggaagatttggaaaaggttgacaaatatgtgaccctggggcttggctgtataaaaaaggaagagagggatgagtatgccacctttctccggctgaaaggatggtaccatgtccagaggcaggaatacaggatggcggaggatgtccttcagaaagcgcttatggtattccgcgagctcgaagacggagggggaaagtatacggcaagcatcgccgcctgctttaattatatcggtgatatctacaggatacaggacaggtatgatgaagcgcttgagtattacatgaaagggataacagtgggccagggcccggtggagacaaacggtatcggccaggtctactgcaatatcggccaggttatgtactgccagggaaggcttctggaggcgtggaattatctggagagggccagggaatgcctcgagaagaacggatacagatgggggcttgaaagagctgagacgtaccttgccatgacctgcctgaaaacggggcggaaggaggaagcggccgagcattacagcagggcggtcggcttatctgctaaaatcgggaatccgacgacagaacagcttctggaggcggtgaaaagagagatgaattaaaaagagagtaccggtgcggccgggagagtctgtgtaaagctctcccggccacatttgactgatggcggtgacctgtgcaaagcgtgcaggctgtcgttatccgcaaacagtatgccggagcaggtatttttaaatatcgggtgttgcgctgaattggtaaagcaaagaagtctgtcatggtagcaaattaaagcgaaaaagtctgtcatggtagcaaggtaaagtagaaaagtaagaaaacatatataaaaaataatttttgtcagtaatattacaagatttgacgcttttttgacgcttcgtgtactataataggcctatcaattgccccggcaaaatgagtgtgccggaacgatgtaacgtatgaaataacagcagtaaaggagaagataagatgagcaaagtagtaattacaggacaggatttaacagttgaacagatcgtagcagtttgccgtgagtgcgcaccgctggaattatcagaagagacaaagaaaagtgttctggagtccagacagattgtagatgatttaatcgcagaagaaaaggtggtttatggtattacaacaggctttggtaaattcagtgatgtagtaatttcacaggatcagtgcaaagacttacagaaaaacctgattatcacacatgccgttggcgccggcaatccatttacaaaagatatcgcaagaggaatcatgcttcttcgtatcaataacctggcaaaaggtttctcaggaatccgtcttgagacacttcagaccatggttgacatgctgaacaaaggcgtaacaccgattatccctgaaaaaggttcattaggagcttccggtgacctggctccattatcccatatggtacttccgatgatcggccttggccttgcagagtacgagggagaagttcttccgggtgcagaggcaatggcaagagcaggaatcccgacgatcgaattatccgcaaaggaaggccttgcactgaacaatggtacacaggctatgacttccgcaggtactcttgcactttatgatgcactgaatcttctgaaggttgcagatatcacggcagctcttgatttcgaggctcagaatggtgtcgtagacgcgcttgaccacagagtacatgatgttcgtcctcattccggccagcttgcaacggcaagaaacctgttaaagcttctggaaggcagcaagaatacaacacgccagggcgaaatccgtgtacaggatgcttattccttacgctgctgcccgcagattcacggcgcaagcaaggatgccgtaaactacgtaaaagagcatgtaaatatcgaaattaactccgtaacagataacccaatcatctttaaagatgacagagcaggaatctccggcggaaacttccacggacagccaatggctctcagctttgacttcttaaagatcgcagaatccgagttagccaacgttgcagagagacgtattgagcgtcttgttaacccggcatacagcggacttcctgcattccttacaccaaacggcggcgttaattccggattcatgattgttcagtattccgcagccgctttagtatctgagaataaagttctggctcatccggccagcgttgacagtattccatcttccgcaggtcaggaagaccacgtaagtatgggtacaatcgcagcaagacaggctggagagatcggccgcaatgttagacgtgttctggctatggatctgatggttgcatgccagggtatcgacatgagaggcaataagggccttggtaagggaacacaggctgcatacgacctggttcgtaaagaggttgcccgccttgaagaagatcgtccgttatacgacgatattaactactgtgagaatattatcgctgacggctccttagtaaaggccgtagaggaagcaattggcggttctattgaattatagtttgaggggtgtgttgtttactttttctctggggagtggagaagtagcaagtatgtatgaagaaggagggcttttatgttaactaaccctgtagtattggcagtattatcactttgtattctttgtttatttaaagtaaatgtattattatctatgcttatttccctgttcatcggcggtgtcgccggtggactggggggtaaccggaactctgtcttccatgctcggaggacttggcgggaacggtgagacagcacttgcttacgttcttctgggaacgtttgcagcttgtatggcttacacaggtatcacaacgattctttctaagaaggttgcagcagtagtaggagagaataaatatatccttatttttatccctgttcttattgcctgcgcttctcagaatatcgttcctgtacatattgcttatattccgattctgattccgccgttactggtagtcatgaaccggctgaagattgaccgccgcggcgtggcttgtgccatcgcgttcggccacaaggctccttatatcgcaattccgatgggctttggtcttatctttatgggtatcatcaaagacaatatgactctgaatggtatggaagtaacccttaacgatgtagcatccgttaactggattctggcagtggccatgctgattggtcttttaattgcgctgtttgtaacctatagaaaaccgcgtgaatataaagacattgcaattgttgaaacacatgaattatcaagcctgaaattaactacacagcactggtgtactatcgctgcaatcgttgttgtagtaattcttcagattaaatttggttctcttccatttgcagcactgggcggacttctcgtaatgttcctgacaggcgcagtaaagagaaaagatattgatgaacagttcaacgaaggtattaaattaatgggctttatcgcgttcgttatgcttgtagcaggcggatttgcacaggttctgaaagataccggcgctgttaatgaattagtagacagttccatcacactgatgggcggcagcaaggttatcgctgcaaccgtaatcacactgattggtcttcttgtaactatgggtattggtacctctttcggtacagttcctgtacttgcagtattatatgttccgttatgctctaagatcggattctctccggcagcaactatcgtcctgatgtctgcagcagcagcactcggcgacgccggttcaccagcttccgatactacgcttgggccgacttgcggtctgaacgcagacggacagcacgatcacatttgggacacatgtgtacctacattcttacactttaatatcccgttaatgatcgcagctatcctggcggcacaggtactgtaagtaacactaaaaactgaatatagcattactacttaaaaaaccccttaaacaacacaacgaaggcggcagagcagatgcataggcaagatgcatccaactctgccgcttttccctgtcctgttgtcaaaaaaacaacaatcgacaatgatattattattaaaggttatttaaattctgcttccctggcaacaggaatttatccagggaagcgcttgtcaaactgttctccgtcatagaggcggtatccggaactctcggcagtcatttttggtttcagaaggctaatcggcgttaaagtacaattgtctttataaccggttcttcaaaaaagaccgggccgccgattctggcatcagtgatttttccgttctttgcggtaaattcagcttttaatataccgcccggctgcttcagctccaggcggaaatcgccgtcggccacatcgcggccgagccataccgtcgaagccagagtgccgcttccgcagctgctttcccagatgaaactgtcggttgcccgaacccagactacgggtgtcatctcaccgtccttgataaagatagcccctgctgcatccacatccgtttccttcgccatcttgtcgagaacagcgtgcgccagagtttcagaaggttcgacatcctcaagaatgacgtgggtgattccctccagaaccacggccggaaagcggagcagtccgctgccgtcggaagaggaaataccgctgtctctgccgcattcctcggggagcgacagctctgtaattgcctgaggcaggggcatggacacccaggaaccgtcttcctccaggagaacttccaggatatctttgcttccggatacctctacgggaatacgctcaccggctttcatgccgtttcgcctgcccagcagcagaccaaagcttcgggacgcgttgccgcagaattccccgcccatcatctccatacgccctgcggcgccccggagcggtttaagcagaaaaccggcctgctctgcatttaaatcttcttcctttaaaatggcggcgcccactgccgcatataactcgggcggaacctcgccctctgcgaatgctgtccgatttccggccggatcggccattgtaatttttaatttgaattccattatgtaaccctcctgtgttgaatgtaaatgatataatttccctaagaataccatacatcctaagcatataatttacaagcggtttcgtgaatttccagtatggagatttagttaagcaggtgaggacgccgccggtacggccagcggacggggtggtggggtgtgtatatgagtctttcgtcccgggggaagattatcgtggtttggggctgcgggcgaagataaagtctgcggagcacgctcccgctctgtgaaatgcatcgcgctgctaagctcggcaggacctcgctaaacccccatgcctctgattcggcaccaccataaatgaaactgcgagggcggcaggtgattgaaattgccgttgattgagcttatactgacattaacggcaaaaatcggcactaatttgggcctgtagcccgttcgctaaactgattttaggtactctcatttgcaccaccatctgtccagccgcttgcggcagaaggacgtacagtaaaataataatagacagagtaccgtgccgtaaattttattttggaggtaaccatatggataaagtttacgacaaatgttgtggtattgacgtgcacaaaaagctcatcgtcgcctgctttagaaaaggcagcaagcaggagttacggaactttggtgcaacaaccagagagcttcttgaattagctaactggcttcagaacggtggctgtgaaatggtcgcaatggaaagcacagcgtcctattggaagcctctgtataacatcctcgagtcttctgaactaaaggctatggtggtgaatgccagccatatgaaagcagtcccggggcggaaaaccgatacaaaggatgcggaatggattgcggagcttcttcagcacggattattaaaagccagttatatcccggataaacagcagagggagttaagggaactggtccgctaccggaaaagcctcgtgagtgaacgcacccgggaattgaaccgactccaaaagatgctggagggtgccaacataaagctgtccggtactgtatctgacatcaactgtatgagtgcgcgcaacattctggaataccttctcaccggagaattcttcgacgaagcaaagtatgatgaaatgtataaacagaaaatcattgcccacaatctcaaagccagcaaggaacagattatcgatgatttaaatggtgtcatgaccccattacaacgtcgaatgatgaaagagctgctgtcccatctggatgaactcaatgttcatatcaacaatctggaagatgagattgataactttatgaaaccggaagaaaaacaagcgacacaagcaatccaggatgtaactggtatcggaaaaaacagttcccaggccattatttcggtgattggtacagacatgagtcgttttccaacggccggtcatcttgctgcatgggcaggactatgtcccggcaataacgagagtgcccaaaagaggaagaccggaaaaatgcgaaaagggaatgctcttttacgttcaaccctggtagtctgtgcgcattccgctacaagaaataaaaattcgtacttttatgcgcagttcatgagaatcagttcccaccgtggaaaaaaacgggcttatgttgcagttgcccattccatgcttatagccatctatcacatactcaaggatggagttgttttcaaagatctgggtgctgattattacaaccaattcaacatggaacgtaaaattaatgcgtacctaaagaagttaaaagcgcttgggtgggaggttccggtagttgccgcctgaacctgttagctgagttcaaaataaacgtcaaaaaggttgatgggggaagtctgcgcttttttggcttcccagaagttaaagtttcacagtaatcagcgatgaatttcaatggcatccgcagactttatcttcccctccgcccaaggccaggttttcgccgggacgaaagactccgccggggtatcgccccgtccgctggcctgcggccgctgattgtctcacgcgttaagtgcgggggcggaccttgtcgcggccactcagtgctttcatatgtgtttgatatatgttggatatgggataaagtatttgttagagtatgtttgttggaagtttgatacgtttgatgtttcaacagattgatggctatgacctgtgctcggagcgtgtgcgagaaatacgatatgccttcaaggcgcccttataaaagaattgcggaaggtttgatataagcctgccggaaacacgtagtggctgcgacaaggctttccccatttaaggttggagacaatcagcgcccggaacggaccatgaccggtgtgcgaaaacctccgcctgagtcttccgtccccggcgataatctgacctggggaagtaggcggaatcaattgcggaggggacatgggagtccgccggtgcttagcgaggttcctcacgagcttagcattccgatgcgcactccaaagagtgcaaacggtccccgcagcaattcattcctgccggattccccctccacgaccaacctcccacggggacgaaagactcagccatccccctcaccacaccggacatggtccgttccggacgcgtcctcccaacctcagttaaatctccactttcgataggaaaccaattcataaaccgtcatacagcaccacccaatcgtagtacctattacaaccgcctggatgccaaaacgtcccagaagcgagtaagtcagaataacacggatagggatctggataattgtcgcaatcagtgtgactctcagatttccgatgccacggaaataaccctgaaagctgttggtgattccgctgaggaagtagaagcaggccatcgggatgatgtagagtatgccaaaccggagcgcttcggtttcttccggtttcaggaagatgccgagaagctggttctttccggccagtacaaggacggagatggcaattgtataaatctctgccattacgattacggtttttaagccctttggaatccggtgatactgcttaccgcctttattctgggcggtgaaggttgtgattgaggctgccaggctgtcacctggggccaggacgtagctgtctataatcgagacggcattgaaagcggcaaccgcatcgactcccagtgtgttgatgccggactggaccagaaggcgcccgatatagagtacggtctgctgtagagccgagatagagctgaaatcaaccgtttttttcagaaaatccatatcaatatgaagctccggcagtgacagcctcagataaggaacctttactttgatatagataaacagcatgagtgaagagacggcctgggaaatcacagttgcataggccgcgccctgtacgcccatatggagcgtccccaccatataaactgccagaaggacatggagtatcgttgtcaggcacagtacatagagaggagcccttgaatctccgatggatctcagcccggctgagagtatattataaaaaaaggtaaatattaatccgagggagatgattttcagatactgtgaagccatcggcgcaatttccagcggagttctggtcatgcgtataaacaatccgcttccggtaaaagccaggagtgaaagtacgatggtcaggataaaaccggagaccagagaagtggccatttccgttttaagagccttataatcttttgcgccaaagtactcggacatcagaatagaagcgcccagagataggcccacaatcaggaaaataagaatattcatgataggccccgctgcaccgatggccgccagggcttctttgccgttatactgaccgacaataattgagtctaccgtctgatataattgctgcagaaggtttgcgaacatcagaggcactgcgtaggtaagcagatgtctggtaacatttccctgtgtcatgtcacgaaccataataagtcctccctggatttttaaatctgattaaagttccggccatattttctgtatgcatagatgtcaaagacgatcatgcaggcccagccaagcacagtgccgacagccacagacttcagttcaagccgtgagatcagcccataggtcagtatgacacggaccgggatctggattaaggtgccgattaaagtgaactttaacctgccgataccccggaagtatccctggaacgtgtgagtcattccggccataaaatagaaacaggccatgggacggatataggaaagtcccagcgcaatggcattttgttcccacggtttcaggaatatcccaaacagaggacgaccggcaaacaagataatcaatgtaacaaaaacagtgtagatgacggcgattgccattgtgattccaaaacctctgggaatacggtcgtattttccgccgcctctgttctgggccgagaaagtggtgacggaagacgccaggctgctgccgggagccaggacatagctgtcgataatggaagcggcattgaaggcagctaccgcatcaacgcccagggtgttgacgccggactggaccagcagccgtccgaggtaaagcatggtctgctgcagggctgagacggagctgtaatcggctgttttcttaagcagtttcagattgatatggatttcagagggcttcagccgcaggacgggtacctttatgtaaatataaagaatcagcgccagcgaggaaacggcctgtgcaatcacggttgcccaggcagccccgtacactcccaaatccaggttcctgacgaagatgatatcgagaacaacattgatgattgttgtcagtatcagcacacagagtgaggttctggagtctccgatcgcacggagggcggcagccagtatgttataaaagaaggtaaatatcaggccggcggaaataattctcagatatccggccgccatatgggagatttcctccggtgtctgtgtaagacggataaaaagcccgcttcccgcataaaagagcagagacagcacgagagtaagaagcagtcctgcgccaattgaggtagccatttcctctttcagatcctcatacttttttgctccataatattcggccattaaaattgaggcgcccatggagattcctgcgatcataaatataaggatattcatgacaggcccggcggcgccgatggccgccagggcttccttgccccggaattgaccgacaacgacagagtcaaccgtgtgatatagctgctggaacagatcgccgattatcagcggccctgcataaagcagaagatgttttgttatatttccctgtgtcatgtctcgtgccataggagcctttccggcgggtgggtcttatcccgcctgtccgctgttcataaatctattgtatccggcaatactcttaatatatcattttgataaaacagatatttcctcttgccaaaacagcgaaatttccctataatgaattttgaaaatcataaataagttactcgtgattgataagaatcattataaggtcaattatagttatctgtatccggtctgtcaattataattttgcagtaaatgtaaggcatggatatattttggtattagttggtgaggaccgttctattctgataacaggaggtacaaaatggacagaattaaaaatatacccggggaggcgaagctgacaccgaaggataagatagtccttgattatatactgaggaaccgggcaaaggcctgttttatgacatcgtcggagattgcgcaaatactggggattagtccttcttccgtagtgcgtgtatcctccaagctgggctttgaaaatttcagccactttaagagggctcttcaggaagagcttgcggacagccggaaaaaggagaaggcacagattccctatgagaagataaagacgattgaaagcctgtcggaagatgagattatcgcggtattaaaggcgaatgtaatgcggaatattgagagtgaccagacgacggcggattatgtcaattaccggaaggcggcaaagctgataacggaggccgaccgggttttcattgtcggattcaggacttgtgccggttttgcatcctcattcggcgtcatgctgggctgtgtgcgtccggggatctatgttgtaaacggcagccggccgctggttgattccctggtggatctgactaaaaatgatacggtaatcggtctctcttacgagagatattccagcgacacggtatttgcattaagtattgctaaaaaggcaggcagtcatattgtggccctcaccgacaaatatacgtcgcccctttgcagcggagccgaggcggttattctcaattccactgagaacctgtccttttataactcctacacgacccttgtcatggcaatggaggtactgctgggccttgtcagcaagaagaacaagagccagaatgaagaacggctgattaagatggaagagtatctgagggagacgggacagtactgactgcagtgctgttctttctttttatttaatttttgttttcatgtttcttacttttgaggcttttgggcgcttttgtgccagtatcaggtagaaaatagcggggaactatgataaaatacataagttaaactgggtttgctgtgcccgcaggagggaaaaatgaaagatattaattatatagtggatattctggaagagattgttaatataccaagtccgtcaggctatacaaagcaggtgatggaacggattgaaaaggaggtggcgggcttcggattttcctccgcttataaccggaaaggcgggatgctgatcacagtgccgggacgaacggagacggtgctgggactgtctgcccacgtggatacgctcggagccatggtgcgttccatccgcccggacggaacactggctatcgtgtcggtgggcggtttcatgatgcagtcagttgaagggagctattgccgcattcataccagagaaggaaagacctttacggggacggttcagacgaaggcgccgtcggtgcacacctacgatgatgccaggacactggaacgcaaggaagccaatatggaagtgcgtctcgatgagattgtgcgcggaaaagaggacgtggaggagctgggcatcgggccgggggacttcatcagctttgacccgaagtttgtctatacggacagcgggtttatcaaatccaggcatctggacgacaaggcatccgcggccgtaatcctggggctgcttaagtatctccatgagacaggccgccagccggaacagaccctcaagatagccatcagcaattatgaggaggtcggacacgggtgcagttatatcccggaggatattgaagagtttctggcgattgatatgggcgcgctgggagatgatctgagcggagatgaataccgggtatccatctgtgccaaggattcctccggcccttatgattttgacatgacaaaccgtctgatcagcctggctaaggaatacgggatcgggtatgcggttgatatcttcccgcactatggctccgatgtttcttccgctctctcggcaggcaatgatataagaggcgcgctgattgggccgggggtatctgcatcccatggtcaggagagaacccatattaaagggctggagcagacatggatgctgctggcggcatatgtgggagtgctggataaggaactcagcaggaaattttttgaacagcttaaggctcagctataagtcggggcggttcacgatcctgaaaccgcagtgatacagggaggataaaaatgcaggcaatacttctggccggagggttgggaacgcggcttcgcagcgtagtcagcgaccgtccaaaaccaatggccctgattgaggacaggccttttatggattacgttgtgcgcggcctgacacgctttggaatcgatgatattatatttgcggtcggatataagggcggcatggtggaagagtattttggaaacggcgggaaggccgggattaaggcatcttatgcatatgaggaagagcttctgggtacggcgggagccataaagaatgcgggaaggtttgtgacagaggagaatttctttgttctgaacgcggatacattttatgagatggactactgccggcttatgaagataaaggaagagaactgcctggatatggcgctggtactccggggagtaccggacgtaacgcgatacggggaggcagtcctggacggcgtgatgctggccggctttaatgaaaagacgggagaggcgcgtcccggcaccatcaacggcggtgtttacctgatgagccgggaactgcttgagcagattccggcaggtaaggtttccctggagaatgagatgattcccggatggatgaaagagggaaagcgtctgggcggctttgtcaacgacggatattttattgatatcggcgtgccggaggattatttccggtttcaggaggatgttaagagaggagtcatcagatggtaatcagaggaagagcgccgctgcgggtcagcttcggcggcggaggtacggatgtggagcccttctgcctggaacagggaggggctatcataggcagcacaatcaacaaatacgcatactgctccatcattccgagagatgacgagcatatcaccgtccattccctggacttcgatatgacggtgaaatacaacacgaatgaaaattatgtctacgacggcaagctggatttggttacggctgcgctgaaggcaatggatatcaagcagggctgcgaggtttatctgcagtgtgatgcgcctgcggggtcagggctgggaacatcctccacagtcatggtggctcttcttacggcaatggccagatggaagggaatcgagatggacaattatgcgatggcggatctggcttacggtgtggaacggtgtgatctgaaaatcgccgggggttaccaggaccagtatgccgcaaccttcggcgggtttaattttattgaatttcacggccgcaacaatgtggttgtcaatcctctgcggatccggagggatatcatcaatgagcttcagtataacctgcttttgtgctataccggcaatatccacgtttcggccaatatcatccgggatcaggtcaacaactacaaaaagcaggatgcatttgaagccatgtgtgaagtgaaggctctttcttatgcgattaaggatgagctgttaaaaggaaatctgcacaatttcggcaagcttctggactacggctgggagagcaagaagagaatgagcagcaaaatcagcaatccgcagatagacacgctttatgaggaggccaaaaaggccggagctttgggaggaaagctgctgggagcaggcggcggcgggttccttctggtttattgcccttataatgtgaagcataaggttgccgcccgtctggagcaggtcggcggtcagcttatggactggaattttgagctgaggggcgcacagagctggatctgcaatgacgaaagatggcagtatcaggatgtgaaggtacagatgccggataaggaatatcaattcaacttttaatatatcctacggaaggcaattcaaataccaggagattagagatggaatcagaaaaaaggccgggcggacagagagatacgggacgggggacggcgccccggaaggcggtatttctggatcgggacggcacaatgaatacagaagtgaattatctgcacaaccccggggatctggaactgattcccggcaccgccgaggccgttaagctgttaaatgaggcaggcttcgccgttattgtggtgaccaatcaggctggtgtggcaagaggatattacacggaagcggatgtggaagcgcttcataattacatgaacaatctgttgaaagaatcgggggccgctgtggatgcattttactactgcccccatcacccggagcatggtatcggcagatataagatgacatgccgctgccggaagccgggaaccggaatgtttgaggcggccgcgagggagctgcccggcggcattgaccgggaaaattcctggatgattggtgacaagctgattgacacggaggccggacataatttcggaatcaggagcattctggtcggtaccggatatggcagtaagattcggaaagagcaggaagcggccggaaagctgacgccggacggcaggtgtacggacggcagctatgactattatgctgccaatcttcttgcggcggcccgcgctgtcgttgagggcatctgttagtgtgaacagtaacaaatatggaacaggaggaagcaaaagatgcagcttagaaacagaatatttgcagcaatactgatacctgcagccgtgctgtccatcgcgcttccggccgtcacgctgtttaccggagacggtttcctggcgccttatatcagaacccctgaagctgctaaaatgctggcggagattgccgtccttcttctgctctcaggagggattttcttcctaataaaaaataaggggagacaggcggccgcggcggcccttctgggagcggcgttctgctggcttcacgtggttttcctacccatggttctttccgccctgtatctcggatttctggtgcttgccgggcgttttctccgggagaaggtgttcgggatagaggaccacagcggttatccggcagatttcctgctgggcagcagtgcggtcattctccttttctgcctcctttcggcggccggagcaggccggatcccggtcatgcaatttatctgtgcggcggccggtctcgtcctttatgcatgctatggtgcgaagctttacaaggagaggggaagaaaagagttactgttcacagggagtattccgcgaggtgatattgattgcagaaccgcgctttacagcggggctgtgaacagtgacagaaaagaaaaagcagccgattctgcgggccgggggagtgataggaaaacgggctccttcggacggttcttttacccgggctgttatacgctgatttttacggcattcctgatccaggcgggcaggatgaacattgccctggactttgacacgctctggtatggcgtcaggtcggaatatattctggccggcggcgcaggaatttacgaaaatcccggactcgtggggatggtttatgtctattcgaaagggctggaggttctgacacttcccctctcggatttggcttcgcacagctacctgttattttttacactttggctggctgtgatggggcttatgatggtttacagaattgcccgtctttttatgggacgggagtacagtgttctggcagcggctctgtgcgcctccctgcctgcaattatgaatatgggaatttctgcaaagcctgatattattacatggctcttgcagttgattatgatagaatatttcttccggtatctgattagtaccgggacgggagaggatagaaacggtaaaggatccggaagggggaatgtaacgctcctaattctgtcggcgggagcatatcttttgtctctcacgatgaaacccacctccctgatattttcaacagccgtattcggcatgatgggcatttacctgatcggttggaggcgtctgtcttttcgcgcatccctcaggcactgggcgtccataatcctgccgggggcggccctcgcaggaatctgggcgagaaccatgatgataacaggaatgcctgtgacctccgttttcacctccatttttgcgaaattaggatttgagatgaaatacccttttgccacaggttccctgcctcagaactggcaggatgagagcaatcttcatgtgctgctccgcaggctctggcagatgcttttatcgccggagggaaaggacatggggcatgtgattatcgcctggggaacctccctgctcttttttctggttctgttcatcgctgcgtccgtaatgatgggggcagccgaaaaaaaggagaggggcggtatcgccactgccgctgccgtgatattctggccgtttctggcggtgaatctgatcagtctggtaatgctttatcaggtggacgggaattattttatgctgctatacacctttctggtactcatagcctgccggaagctgtcaggccttgcacaaaagagtgccaaaggactggtcatcctcctgctggtgccgcttctcgggtttaatatcctgttgacggcgcagacaaactgggcatggtcggtggggttttcagagatacggccagtcaataaggggcgttataaccataaagcaaagcagcatgaagatatgattattaaaggaaatgcggctatctggcagatactggcggccgatcctgaaaacagggtcatcgcctttggagatcatccgttctgtctgcaatttccgtgcaacgtacagtcttacaaagacatcacatcgccgtggggaaatgtggagctggtcaattccccggaagcgtttgaagaatatatggagtatgccggtacggattacgtttacgccgagtccggatatatcggcaccgacagctgggagtggagctatggactgctccgggacctgatatcggacggcgtgctgaccgatttcttttttgaaaacggaaatatgctggcccggtacagcagggaaaagctgccgggagaaaaagcggcggaaaatctgcggctgtttgatgagaattacatcacttcggatatggtgaaacaggaggtaaaagagaatgaatgaatacagatatctgacagagctttcagaacggtatcccgtgttaaagcagacagagaacgatatcaaggcatcctatgagattatcagggaagcatatgaaaacggaggcaagcttctgattgccggaaacgggggaagctgtgccgatgcggaacatattgtaggcgagctgatgaagggatttatcaaaaaaaggccggtatcggaagagatgaaagaggcgcttattgcggctgacccgtcaaggggagaacggctggccggccggctgcaacaggggcttgcggctatcgccctgacaggccatccggggctttccactgcttttttaaacgatgtggacggggaaatgatatatgcccagcagattacaggttttggaaagcagggggacgtatttctcggtatcaccacatcgggaaattctgaaaatattatgtatgccgccgtggcggccagagcaaagggaatgaaagtattaggcctgaccggaagggacggcggaagattgaaggggatctgcgacgcggcggttgtagtgccggaaaatgagacttataagattcaggagctgcatcttccgatttatcatgctctctgcctgatgttagaagagcatttcttcaatcagtgattgtaattcagatgttactgttgacaggcagtatcccgcgaggtgttattgttcgcagaacgccgctttttggcggagtgtgaacggtaagttcagacaggtctcgcatttgcagcagtttggccgaaggctgaactgaaatccaataagacatgagacaggaaaacggagtttgcaggataatggattataatgttgataaaagtaactggagggcaggcagctttgcgttctatgctttccttttgtatacggtattaatatggagctgtgaattactcgatttattctgctggcttacgggcattccccaggttaccttcatatcaagagtggcagcccttgcctttactgttttttttggatggcgggtaattggggttccgagggtgaaacgggttaagattgatgcttatatggtactggggagcatattgatagcaggcttctttgccgtcaaaggcatccggccggatatgagctatgatacttacaattatcatctgctgagccagatcccgggttttacggacaatttgaattaccacgttatgccgggaaaattccagatgttcggtttccgtctgggggacaggatgttttatccgttccgcgccctgctgggactgaggatgggaactcttttaaatgcggcggcaatgcttgtcatttaccgtcaggtcaccgtatttctcgcatggtttcaggagtccttcggaaataaagcgtggaagcttttgtgccgtccgtcgcttgtggccttctttgttgtctgccgctttgacctgatattacagagcggaacctatatggtagagcttctggcgctccctttttttctggaaatgctgtttcttctggtgagggagagggaggaagggagcgtccggaaagaagcttttgtcttcagcctgaccggcggaattcttttctgtatgaagatgacaaatattgtatatctggtgccgctggtgcttttatatatctggaagataagaaaggatatcacggttcctctgtttctgtcctgcctggcggcaggagcggttccggttacggtttatcttgtatacaatacagtcagtacgggaaacccggtttttccgtattacaatacaatattccaatcggaatattatccgattgaaaattttaaggataggcgctggggaccggccggaccaggagaagtgctttgctggccctggtacatgatacgctatcccgattacaggctcagtgagcttccctgtgcctataatctggatttagccgcaggatatctggggatggcggggattttggcggcgggcctgtacggcagaatccggaaaacaggcaggaaaaaggccgggaagtaccggagggaacttctgctgattgccgtatatgttagctccatgatgatatggaccgttactaccggtcatacaaggtatttcatgggaggaattctattaaatgggattctgctggcggtctgctaccttcgtctgatgaatgcgggggatggcttcccgcactggccggaatccttctgatacttccgtttgggggccgtgtggagtacggttttaagtcggtatggcagggatacgaatggggtatgagggacagttccctggacagctataaaaagaatgccagatggatattcagggaccgggagattttttcccagacggtgaaggcgcaggtggatgtgatctttctgacctgggacgactacggaagctacgcacgcctgattggcggagacgttcccgtttacaaccggaatgcgattgtcggggagctgaaagcccatcaggatcaatacctggcgcaggtggaaacgttcatgcgtgaagggaaaggtgtctacgatatgtttccgcaaagtgcggagaaattggatgcataccttgaatggatgaacaaagcagggtattatgtagatgatatgttttatatgaccgataagctgtccggcccgcaggcctttaatatggcaaggctcagcatggcggacgggcggaagaaccgatggtattatgcatatgccgatgaccggcagggacgattccagatggaaaagaattccgaccattataagatgactgctattttcggggatccggactggtggctcaatccatatccgttccggattattatcaccgcttccgatggaaatacggcgaagatagccggaactgtggatttgacaggagccttcgaataccaaaaaacggaaacagagcttgatctgaccggcctatccggtacaataacgataagctttacctcatccgttgaaggaaaacgcggtgtggcggtcaatccggtgatagaagaagcggtgcggcaatagaaaattaaacgtaactgatcacactgttttaaacgataatagagaaacaagattaagagtaaccagaaagcaggaggaaaagagaatggatacgattgcagtattgattccctgttacaatgagagccagacaatcgcgaaggtggtaaaagactacagggaggctctcccggaagcggtgatttatgtttatgacaacaattccactgaccataccgatgaggcggccagggaggcgggggcaatcgtccgctatgaataccgtcagggcaaaggcaatgtaatccgcagcatgttccgcgatattgatgcagaatgctatctgatgatcgacggggatgacacctatccggctgaaaatgccaggagcatggtgaatcatattctgtcgggcagggctgatatggtgataggggacagactgtcctccacctatttcacggaaaataaaagacctttccataacacgggaaaccggctggtgagaggcctgatcaacacgatttttaccagtgatataaaagacattatgacaggatacagggcctttaattatgaatttgtaaaaagcttcccgattctgtccaagggcttcgagatcgagacggagatgagcattcacgctcttgataagaacttcaagcttctggaggttccggtaacctaccgtgacaggcctgccggaagtgtctccaagctcaatacgtataaagacggattcagagtgctaaagacgattgcaaggctgttccgcgattacaagccgtttgcctttttcggctggctggggctgctctgctttataattgcaaccatatttttcgtgccggtccttcaggcctatttttccaccggcctggttgcgaagtttcccacgctcattgtatgctccggcatctatgtggtatccttcctgctgtggatgagcggacttattctggatgttattgcaaagaagcacagacagctgtttgaactgtatctgaacattctgagcagcaaaaaggagccgaaataaaggagaaaccgataaatggaaccgatgagaaagaaagcggtgaaagtgacatctgtgcaggcaaaggcagtctggatacttcccatactgcttggaaccgcgttttgtttttactatctgagccttgccgctgacaatgtggctttttcagattatgtcaggctgattaactcctatctccccgatgtggggaatccggctaaattttttgtgccggatatcctcaccagggtaccgataacgtatctgggaagaataattaatgtaaagctgctgggatataacacttttttcgatatggcactcggtgtcctcggattgggactgggagctgcagctttatctatttacgcaggcaaagaaaagaaaatttcctacccatggtatctgatgattctttttgtttacttcagtctgaataaatgggagatgctgacgaacgggacgggctgggtttgtttcgccgctgtgtccggttttatctgccattatgtaattcttgatcgggccgttagaacagggcactgccataggagggacagaatctttctgatggcgcttccctcttttctgacgctgtttgtggccggcccttactgcggaagctattcggctctgctgactctcgtgtatctcgttatgctggctgcagattatagaaaaaaggggaaaataaaccggctctatctggggtacctcgcggcggtgcttattcccctggccctgtacctgtggagtaattcctatgcggtttatgtacacagaggggcggtgacggacggaaatatcatatcccagctgattgcagatccgttgttttttgtcacctttttattaaatgcgtttgcctcggctgtgctgggacagaaccagatagtggattttgcaaataaaggaagtattttcggaagtgatccatttgtttatcttctgggagcagcggttatcttcctttacctgtacagcctgtatctgaacctgaaataccgtctctatgagaaaacaatattcccgctgctcatgattctgagcggagggatcaaccacctgctgattctgtcggcccggtggatattcttaaaagacagttacggcatgacatcccgatacgcgctgcagtatcagatgggaattatcggaatattactgacgtttgccgtagtcatgcggctgggccgtgagactgaaaaatccgtgaaaaaaggcccgggcccaataaccgttgtacttgtcggtctcggcgcctgcctgattcttgcaggaaacgcctggacgacaaaggaggagttgaagactgcccctttccggaaggattatcttcagatatccagggaactggcgatgaattacaggacggccggcgacgcggagctggtggagtatcttcacaatgatcctgattcagtgagaaaggcaatgaagattctggaagagaacaacctgaatctttttagaaaatagattatggcagccggtgcagggccattgaaccgccggaaatgcagaggcacggaagaataaaggagggtacgcccatgaaagtagtgatattagcaggaggattcggcaccagaatcagcgaggaaagccatttaaagccgaagccgatggtggagataggggaacagcctatcttatggcacataatgaaatattattcccagtttggctatcatgattttgtaatctgtctgggatacaagcagtatgtggtaaaagagtattttgccgactatttccttcacacctccgatgtgacctttgaccttgtaagcaacagtatggaggttcacaacaattattcggaaccgtggagggtgacattggtggatacgggccttcatacgatgacaggaggacgcatcaaacgcgtgcgcgaatatatcggtgacgagacctttatgctgacctacggcgacggcgtgtctacggtggatctggaggcgctgcttaaattccataagagccacgggaagattgccacgataagcggagtgaatatcggacagcggttcggcgtcctggatgtggatgcggacggtgcgattcatgaattccgcgaaaagagcgatgatgacgggaagattgtaaacggaggtttcatggtaatggaaccgggagtctttgattatatagaaggcgatgataccgtatttgagaaggcgcctctggaaaatatggcaagggacggacagctgatggtttaccgccatgacggattctggaaatgcatggatacccagcgcgacagaatgcagttggagaatatgtggcaggagggagacgccccctggaagatctggtaaaaggagcgcagcagtaacggttcttgctgtctgaactgttacgcgcagcacgcagtgcagaaatacgaggtggaaaatatatggagttactggagttttacagaggaaaaaaggtgcttgtcacggggcataccggctttaaaggttcctggtttgtcagaatgctgacgcttgccggtgcgcaggttaccggatacggtttaaagccgcccacacaacccagtatgtttgagataacgggattggagaatacaatcgatcatgtcatcggagatatacgtgatttaggccgtctgaaggaggttttcgaccgggtacggccggagatagtctttcacctggcggctcagccgattgtgcgggaatcctatagagaaccggtttatacctatgagacaaatgtgatgggaactgtcaatgtgctggagtgtatccggctgtgcccttttgtccgctcctttgtgaatgtgaccaccgacaaggtatatgaaaacaaggagtgggaattcggctacagggaaaatgaccgtttggacggttatgatccttattccaacagcaagtcatgttccgaactggtgacacacagctataagcagtccttttttcaggacggccgctgtgccgtctctacatgccgggcgggtaatgtgattggcggaggagacttcgcggacgaccgaattatcccggactgcatcagggcggccatggccgggaaagagatcacggttcgcaacccatactcgatccgccccttccagcatgtactggaaccgcttttcgtctacatgacggtggcaaagcggcagatggaggaaccggctcttgccggaaattacaatgtgggaccggatgatgcggactgtgtggacacgggccgtcttaccgatctgttctgtgagaaatggggcggaggacagacctggatgaaccggcatgacggaggacctcatgaagcaggtttcctgaagcttgactgctcccgcatcaagagagtcttcggctggcagcctgccttccacgtgggggaggcggttgaaaagaccgttgaatggtcgagggcatggcaggcaggggaagatatgctggctgtgaccgacaggcaaatcaatgaatttttagaaaagaaccgacatggaggtaaataagatgtctgatgagaagataacggcagcaggtgaggaagcggcgcgcagccatatcctcgaactggtggctgattactgtgacaaatatcataataaaaaaggtcccttcgaagaggggcagcgaattccttatgcgtcccgcgtctatgacagcagtgagatggtgaatctggtggacagcgccctggaattctggctgacctccggccgttatacggaccggttcgaaaaagggctggccggttatctgggagtccgctactgttccctggtcaattccggttcttcagccaatctgatcgcgtttatgactctgacctccaatctgctgggggagcggagagtgaaacggggagacgaggtgattacagtggccgccggtttccccacaaccgtgacaccgctgattcagtatggagctgtccctgtgtttgtggatgtgacgattccacagtataatatcgatgtgacgaagctggagaacgccctttccgataagacaaaggctgttatgatagcccatacgctggggaatccctttgatttggcagaggtgaaagcattctgtgacaaacacggactctggctggtggaggataactgcgacgcactgggaagccgttatacggttgacagtgtgacaaagttcaccggtacgatcggggatatcggtacttccagtttctatccgccgcatcacatgacaatgggagaaggcggcgccgtttacacggacaacgccctcctgaacaagataatccgctccttccgcgactgggggagagactgcgtctgcccgtccggctgcgacaatctctgcggccaccgtttcgacaagcagtatggagaactgccgctgggctatgaccataaatatgtttattcccatttcggatataatctgaaggccaccgatctgcaggcggctgtgggctgcgcccagctggagaaattcccttcctttgtggagcgcaggaaacacaatttcacccgtttaaaggcgggcttgagggacggaaaatcagtacattctgccggaaccctgccaaaattccgatccgagctggttcggtttcctgattacatgcaaagagggtgtgaacaggaatgaagtggtgcgttatgtggagtcaaaaggagtgcagaccagaatgctgttcgcaggaaacctgatcaagcatccgtgctttgatgagatgagagagagcggcagcggataccgcgtggccgggactttggaaaatacggaccggatcatgcgtgacaccttctgggtaggcgtttatccgggcatgactgatgaaatgattgattatatggcgaaggtgcttatagaggcagccgaaacagcaggaaaagaggcgtaaaacggtgacggagacagccgcaaagacttatgatctgacaaaggttcatgaggcgaacaggaaattattaaaggaaattgaccgcatctgcaggaagtataaaatcaactatatgatggattcgggcacccttttgggagcggtacgtcatcagggctttattccatgggacgacgacgtggatgtggtatttacaagacagaactttgagatgttcatgaaggtggctcccagggagctgcctgacggaatgtcggtgctgcggccggaagagatcaggggcggtaaggtgttttatgattttacaaccaggattatctacgaaaacagccgggtacacgaggataatgagcagatgcgtttttacgacgggaagctgaatcatctgtgggtggatttatttattctggatcggctccccgatggaaaaggagcggccgcccgggcaaaattcatgcagaaggttatttacggcatggctatggcccacaggaacggcctcgatttttcaaaatacagcctggcggacaagatccgggtgggcgtccttgccacggcggggcgtctgatcccgatgcctgttttattcaaactccagcgtctggccgcgatgaaggatgcggacaaaaagacaaagcgctggtattacagtaattaccagccggattacctgtatgtaacgctggaaggcgagtggtgcgagaagacgcttgatatggagtttgaagatttggaactgatggcgccgattggatttacacatgtgctggagttaatctacggcgattacagaaagctgccgccgccggagaaaagggttccggcccattcgacaattgagatacagatatatgaccaggagaaatgacaaaacaatgaaaaaaatttcaattattatttctgtctacaatgaggaggaggcactggaggaattctaccgtgtatcatgtccggtgttcgaggctttaagctgggattacgagctgatctttgtgaatgacggaagcgcggacggttccctgtctattttaagacggtttgcagaggagaattccaaggtcaaggtgatcaatttttccagaaatttcggtcatgaggcggccatgctggccggacttgattacagcacgggagacggccttgtatgtatggacgcagatttgcagcatcctccggaatgtgtggagcagattatcgccggatttgaggaggggtatgaggtgatcaatatggtccgcaccagaaacaggtcggccggattcataaaaaatttaacctcctccgcattctataaactgattaataagatatccgatgtgaagctggaggccaatgcttcggatttttttgcaatgactgagccggcggcgaaggtactcagggaaaattaccgggaaaaggtacgttttctgaggggatacgtacagaatattgggtttaacagatgcaatatagaatacgaagccaggccgagggtggctggggaaagtaaatacagtctgagaaagctgtttaaattttcgattaacacgatcctctgtttttcggatctgccgctgaagctgggaatttattccggaatgtttgtaggttttctgggacttatcgtaatggttgacacaatttacgagtgggccgtgcatggtacgcctaatggatatgccacgatagtggtccttctctgttttatgttcgccatgctgtttgtcgttgtggggattatcggggaatatattgcaatcctgtttacggaactgaaagaccggccgatttatattgtcaaagatacggaaaacattccttcaggcagcggctgcgggccgttagaaaatattgacagggcgaagcgggatgaaacatgatatgatggtgaaagaaaagaatgactgtcacaactcacagccctgtgggatttggggctgtgcggggcaactgaaaattatctggggaaaattatttatgaagaaattaatgagtttactcttgagtataattatgattcttgccggacctgccatgacttcctacgcgaagccggactggccggccgacacggggattcagtcggaagcgggaattgtcatggacatggattccaaaacggttatttttggacagaatatccatgttcaaaaggcgccggccagcataacaaagcttttaacggctctggtcgtgattgaaaatgccaatttggatgatatggttacattttccgatgacgctatccacaacgtggaagagggcgccggcaacaagaatgcgctggagccgggggacaagatgacagtgaaagactgcctttatcacatgctgctcacttcgtccaaccagtcggctaacgctctggcagagcatgtggcaggaagccgcgacgcctttgtggcgatgatgaatgagaaggtgaaggagttgggctgtgagaacagccattttgccaatccgtcgggactgaacgacgatacgcagctcacgacagtatatgacatggcgctgattggaacagcggcatatgaaaatccggtgcttctggagattgggtcggccaaaagctaccgtcttccgcctacggccaataatccggacggtgtgacgattaagatggaacataagatgctgaccgagggagatcccaactattatcaggcggccattgccggaaagacgggatttacttcgattgccggtcagacactggttacttacgcttctaaggatgacagaaagctgattgcggtgacgatgaagagtacggagtttacccattatcaggataccaaggcgcttcttgattttggcttcgaccgctttaaaaatatcaaaattgctgagaatgagacctcctatacgacaggggatcagccggtggagctgggggacagttcctatgagccgtccgacctttcaattgaccctaaagcagtgattaccgttcctaaggatgcgcagttttccgatacggacaagaatgtggttactaaacttccggagaatcatccggacggagccgtggctcttcttgagtatacctataatgaccggaaagtcggagaagtttacataatcagtgcaaagcaggcggccatcgacgagacggcacaggccggtggtgaaacgccggaatcagcgcctgaaggccaggacagtgattccggcaaggaggcgggcggaaccgcgaattttgcctttaagctgccgaaacaggcgccctggataatgcttatcggcgtgcttgcggcggcaggtcttgggttttccattctctttatcaaaaagagaaaagaggaagaacgcagacttatggaggagcggcggaggaagagaaggcagcgtttggaggaaatcggatgtacccaggaagaatttgaacgcctgctggaggaacgcgcaaagcgggggaaatgatcgggaggctttgaggagggagtctcccatggaaggttgtcgtgagtggggactccctcctcaaattattcagccccggaaacgggtgatacagggaaatcggcgaggtgtttccatgctgttttcatcagtatcatgaagtcatttacatgtcccggcggttttccgtttttcctgcgcataagacagatgggagtctgtaaaagcgtactgtcatttttgataggaaaagcgttacatcccgacagtgtcttcatcagggaaggaagtctggacttccggcagaagaaagcgcccagatggcagggataaagggaaatcataagctccgtattggaggattcaatataaacattgggtttaaagcctgcattgtggaaacattcgtcggcaacccggcggagcctcatgggaggcttgtgcaggataaacggaacctgggaaaattcgtgcaaatctgtaccgcaggcggcctgttcttttattcttggcgtatccttgccgaaatagtgctctaacaggatatcggaacagataatatagctcttttcttccagtaaaagggtaaaatcgatccggtctttcaaaccggacacttcagagcggctgggggttccgatcagcagatcgagagcgccgtcgcaaagcatctgtaacatctcttcggaggattcctccacaagttccagtgaaatatttggccatcgtttgtgaaaatcgggcaataccatagggaaacattcggcggcgcggtaagccggaataccgattctcaggaggccggagtgcttgctgctgatgtcggaaaaagagttaatgagtgattcattttctttgataatcacccccgctccttctacaagctgtttacccgcatacgtgagctggagtttcggctgacgctcaaaaagtttgacgccgtaatagagctctaaccgctgaatctgaaagctgagagtctgctgggaaatgtaaaggcgttgggcagcggtggtcatattcaaatctttcgctacttctaaaaaactttcaagatatttaacattcatatggacagtcctcctctttcaggattgatttatggttatgaggacgctgccggcaggccagggtccggggtggtgaggggtgtggatgagtcttcagtcctggtttataggttatcgtgagggggaatccggcagtatgaattactacggggaccgcttgcgctctttggagtgcgtagcaggcactaaggcgtcacaagacgccgcctaagtgctgacggactcccatgtccccctgcgtaattgatactgcctccttccccgggatacggatcgacgggactgaagactcagggcaggttgtcgcccggaccctggcctgcggcccgctgggtttcctcatgctccaaggggggagcgcacttgtcacggccactacttgttcatttcgattcaatgcctcatttttttcctttcgtttccccggagacaaaaggatttttttctggaactacgtagtggctgcgacaagtgtccctccgcacttgaggaggagacaatcagctgccgcaggccaatgtccgggcgaaagccttccctgagtcttcagtcccgtcgatcctgtacccggggaaggaggcagaatcaattgtgcaggggacatgggagtccatcagtacttaggcggcgttttgtgacgccttagtacctgttatgcactccaaagagcgcaagcggtccccggaacaattcattctggccggattcccccttcacgacaacctgaacccgggactgaagactcataaaaccacctccaccaccccggacattggccgtcccggccgcgtcctcctgccatattagatggctatagttatcagtatactaccaaaaatacttgtaatatatatgagttttgcacaaactttctgttggaaaacaaaaaggcatttagatataattactacatactaaatatccattggaaccataatttgaagggagaatgaaaaatgcctgttggaaagcgaatttatttacagcgtaagctgccggatgcacaattaatcgaggactttaagaagatacccgcatcaaatgtgggggatgtaatgggacggaactgcgcgatgaatccccgtattcatctggtcagcagtcctaaggcgcagatgatggccggaccggcctttaccgtgaaactcagggcaggtgataatctggcgcttcatggcgcgctgaatcactgcaatgagggagatgtgctggttgtttccaatgagggcgatacaacgagagcgttgatgggagaaattatgatggcctatctcatgctcgtaaaaaaggtttccggaatcatactggacggcccaatccgtgacattgatgagataggaaagtgggattttccggtatactgtacaggaacaactccgggaggcccctataaagaaggccctggtgaaatcaacgttcccgtcagctgcggcgagatcagcgtaaacccgggcgatattattctgggcgatccggacggcgtggtagtgattccgcgaaatgatggtccgcagattttaaaggatgcccagatgttccaggaagccgatgagaagaaactgattgccgtaagagaaggaacttctaaccgggattgggtggacaaggcgcttctggatcatggatttgagtttatcgacgctgcttacgaagcatgacaataagcctgataatgcattggcccaatctgccggaatgatatccctgctgattgagccgggcagaggcgggctttggacagcagacaaaaacagaggattataacgggagaatgccatgaaaattgttgtactcgatggttatacggaaaaccctggcgacctttcctgggaagggttttggcagttcggtgaagtgactgtatatgatcgcacagaggaagaggaaattataaatcggatcggtgacgctcaggcggtaattacgaataaaacgcccattacccgcgaaacgcttaacgcctgccctgatatacaatatattggtgttttagcaacaggatataacgtggtggacacagatgccgcaaaagagagaggaatccctgtctgcaatatccccacctatgggaccgcggccgtggggcagtttgccattgcccttctgctggaaatctgccatcatatcgggcatcacgataaggcggtgcatgacggacgctggcagaattgtcccgactggtgtttctgggattaccctttgattgaactgacgggtaagacaatgggaatcatcggtttcggccgtatcggccaggcgaccggggcgatcgcaaaggcattgggaatgaaggtgctggcttatgatgagtatccgaacgaaacaggacatggaatcggggaatacgtttcactggatcagctttttgaaaaggccgacgtcattgcccttcactgtccgctgtttcccgaaacagagggaattatctgcagggataatatagcgaaaatgaaggacggtgttattattatcaacaattcccgcggccctttaattgtggaacaggatttgtatgacgcacttgaatccggtaaagtttttgcagcaggtttggatgtagtttcctccgaaccaatcagagaagataatattttgctcaaggcgaagaactgcattattactccccatatttcctgggcatccagggaaagcagaagccgtctgatggatatcgccgcagctaatctcggcgcgtttattgacggtaacgccgtcaatgtcgtcaacctatgagcaggcggaaatatattttaatgccggactcctttaaggggacgctgtcgtcctctcagtgctgccggatcatgatggagctttataccaggatacggaggcgttttatgaaatagactgataagaaaaggagagaaaaatgagttataaagtattattaccgcagccaattttaccggaaggatatgagtatctgcgtcagcacggctatgagattgtggatggaagaggatttacagagcaggatatcattgaagatatacgggattgcgatgctatgatagtgagaactgctaaaattacacgcaatatactgaatgcggcgccaaaattaaagatactggcgcgccatggagcaggatatgacggcatcgatttggatgcggccagggaaaataaggtattggtggtaacggccggaggagccaacagcatttccgtcgctgaacttgcaatcttctatatgctctactgttcccgtaattttaaggcggtgttaaatcattacatagaagactaccgctatgcaaaaatgggaatccctaagacggaattgagcggaaagacccttggcctcataggtgtgggaaatatcggcgcactggttgctaaaaaggcattttacggctttgacatgaaagtgattgcttacgatccgtttttcaaaggggaggcgccggaataccttcagatagtctctgagcgggatgacatattcaaaaacagtgattatgtatccgtgcatgtaccggccgcaaaggatacgatacacagcatcagtgacagggaatttgagctgatgaaggacaccgcttacctgattaatacggcgcgcggttcgattgtggatgagccggcattaatccgggcgctggaagctaaaaaaatagcgggcgcaggattagatgtattggaaaaggagccgcttgacccggaaaacccattgttaaagatggaaaacgtactgacagcgccgcatatcggcggagcgacaaaggaggccgcggccagatcctctgtttcctgtgccgaggcgatcgacgatttcttttctgggcgcactccaaaatttgtgatacctgaaatgcgggatatgatataatgtccggaatataaagaatcatacggaaaacagcgctctattgcttgaggacggtaacctgtacgaaaagcccgcaggttatcgttttttgcatggtgaaacaacataaatattgtcgaaacaggaaaaaaatcctgttagacaattgtataacagctatgctaatattagctcagaaaagtcggcgcgcagatttggaaatctataatttataggaatggaaggttgtatcgaaatgcttgaatttcagcttggagggagaattttatgagtcaaatggctatcgctttaatcattcttggcgtcaccatattatgctttatctttgaaccggtcccgctggtggtttccgcagttacggcatcgatcctttatgcgtttacgggactgatcaagatggaggatgtgtttgtcagctataataccaacacgattgtcttaatgatcgctatgatgataatcggttcctcgctgtttcactccggaatcagtgaggtaataggggaaaagatgtctaagtttacagggaacagtgagaaaaaggcgattctggttacgatgatcgcatcctgtgcccttagttctgtatgcacaaacattggcgttatgactgcgctggccccgctcgtcacggctatgtgcctgtcagccggtattgcgccgtctaaagctctgctggcgcttttgtttggggcgcagctgggaggttttaatacgctggttggagttccctccaatgtatttgccaacagtctgatggtgggacaaggttatgaaagtttccgtttatttgatataacgccgttcggtctgggcgtctgtgtgctgggcagcctttacttcgcattttttggttccaaaatgcttagagataccggttatattccggaatttgcccagacagagagaaaacaactggataaaagaaaggcagttatatcctgcaccacgctgtttgtcgtattgcttgtgattgccatcagtccggatgcagttccgatgcatattgcggcggtgattggtgcgctggtgattgtcggaacaagatgcatgacggttcaggaggcctcccgatcgattgactggaactgtgcatttctgatgggatctctgtcggcgctgtccgcaggacttcagaacagcggcgtcggcacggtggtggctgagatgatattgaaagtctttggccagaaccccagcacgttcctgataacaaccgtactgttcttcactattgcgattttaacacagctgatgtcgaatacggcaacaattcttctgtttatgccgattgccatctctgtagcggaatctatcggagtcagcgtttatccggtagccatgatcgtaacgttggccggggcggcatcgtatgcgactccatttgccgctccgcagaatatgctggcggtgggctggacaaattacaaatttatggattttgtcaaggtcggcataccgatggtattgcttacttatcttgttgttatatgcttaattccaattgtaatgccattttagaaagaggtggaaacgatggtccatgaactgctgtcaggaacctacgatttacatattcatactgcgccggatgtaattccgagaaagtgtacagacgaggaaacggtccggcggctcgaggctgccggtatgaagggatgcgccattaagtgccattattttgagacggcggccagagcggctctgttacaggagcgttttccgcagatgaaaattgttggaggacttgttctgaaccgcagtgtcgggggaattaatccggaagccgtggagcggttcggacagatgggcggcagaatgctctggtttcccaccatggacgcccgttcgtttcagcagtataagaaaaaaacgtcacaagtgccgtctcattttctgacggcctcgggagcggacgggaaactgtcggcggagaccgtcagggtgctggagaccgcagcccgttatcagctgacgctggggaccggacacctgaacgccgacgaagggcttgctctgctgagagaaggcaaacgtctcggaatcgaacggatgatggtaacccatgtggaacatccggcgctgaattacagtatagaacagcagagagaagccgccgcaatgggggcaatgattgaacatagcttcaacaacgtttttttccggcgcagcacgataggagaaatagcacggcaaatccgtgccgtaggctgcgggcatgtgatactgacaagcgatctcgggcagacggatgcgccctacagcgacgagggaatgcttcaatttgccgaagctcttttaaaacaggggattacagagcaggagctggcagtaatgatgaagcagaacccggaaaaactgataaccctgccgtagagtcatatgcggcatccgcagaatgatgagtaccgccgttttccggctaaataaccaaccggaaaacggcggtatttatggcataaaaaatatgtgatgtgtcagatcggggactttttggaagaagtgatatgcaaaggctggaaacccttgaaaatacttatttcttaacaaatgtttggaaaatatgaagattttttgaatttttcaaaaatgactacaaaaatgaacaagtatattatataatagccatgcggcgcaaggaggtatacttttgatgaaaagatttttagtgttagcagcgtgcatggttcttctcagtggatgtacacagagcaatattgtaaacccggaatctgagacaaagattgcggatcctaatttcgatattcaggatgatatagagattgactggactcaggtaagtgcagatgcagagagtgtcttcgaggatactggtgcatatccgtacagcaaagatttccatttccttctggaaccgcagaagaaagaagtcatgctggtgtgggtggtatcagatgattttccggccagcgaaatcagaacttattcggataatctgattaaaggatttaatgacgtagtggctacccaggatttctcgattgagacatcgagtgatgattcgtatggcggcctctggaagaattacgcactttcgtttggaattgcacctgaaagtacacaggatgacgaggaaacctggtttatcagcggcaattttggagcgggcgtagattttgtccttcctgatacggcggagctggaaaagaacctggcggctcaggagagcggcggcacacaggcggctgaatagcagccgttaagtaattgaattagcaaataagcgtcctgcaaatgcagggcaaagcaggtaagaattaaaacaggatgggtaaccgggtatgagccggatatccgtcctgttttttccgttttacaggaagtctgtcctatgaaacgataacctgcacgctctgtgcaggatcgtgcagggagtacgcaaaaaagacccgcctgtttcaggaaacaggcaggccgctgtggtacgaatagttgccgagttcattcatcaaaagggaaagatcctgtttatcaagtgaaacagggcttgtaatgcagttatttaacagataatagacattgctgcacttggccagtgtctgatggaacagatccacaaatgaagctgtggaggccagggaacgtttccaggggttgcaccagggctggtgatccaggttgcagctgttgcggtaattggatatcgtatcggtcaccagctttgcggaggcaaccggctgctttaaaaacagggattcaacaaattcaatgctgtttttcttccttcccgatttatcggccagggtgcggcagccgaaacggatggcccagacggaacggtgaaccatggccggtgtcacctggaaattattgcggtatgtgattgggtaataagtttcattgatacaggatgccaggaaatgggaaataaattgaagctcctggccgtttaaacagatactggccgtctgattgaattcggacggttttttctttttatatttccacagcaggatggcatccagctcattttccagagccgcatgcaggccgtggttcttcgtcgagggttcattaatgtcatagccgatcctgccgtagataaagggatggcagatagagtcggcaatataatggttaataaaaccggcaaggtaggcgacagcttcttctttctgctgtctcgagctgatcaggccgatatggcgcaggcagcagtcgaaaaactggctgacctgatgttcatgcatgtgagaaccgacattcctgtaatcctgatgacggagaatgggaatgttgtaaaagaaaatgtcggggccctggaggccgagctgataaagccagcggtatttggctacgatatgctttaactgagagttcggcatatcattgtatgctttcattccgaatatataatgggtagtaaaacctggcatgataataccctcttccatttttattttcaattattcgcggtgagtgaaaagcagtggattgcgtatttcacattttgctaagtattcatagtataccacattccttaacggattgcgatagagtttgtgcataaggagctggaaagaagaataaaaagatacagagaatggaaaattagcggcggcaggatggagagtgtaaaggtaatccatgatctcgtatggggaccatggcttttattgttatttttaggaacgggaatcttttatacgttcaaattaaagggatttcagatttttcatttcaggtactggtggaaatctacggcaggaacgcttggaaacagggatgaagaggcaaaatcacaaattgcgacggcatgtacggccctggcggcgaccgtgggaacgggaaacattgccggagtggcgacggctatcgctgcgggcggtcccggcgcagtattctggatgtgggtgtctgcctttgtcgggatggcggcagcctatggagagacgtatcttggaatcagatacagatacaggggacggacggacagtatatctgcggtccttttgtatatctggagcagggcttaaaaagccgaggtatagggctgctctatgcgttcttctgtgtcctggcgtcattggggatggggagcatggttcaggccaattcgatttcagacagctttacctatgcattttccctgccgcccctgattaccgggcttgcggtaacggttctcacgatggcggtggttttcggcggaatcggaagaatatcggaggctgccagcaggctggtaccgttttcggcctgcctttacatgtttttatgcggtattgtgattttcagctgctatgataaagtgccgggtgtgttcagcgagattgtgcgggaggcatttaactttaagagcgccgccggaggggcagcagggtacggaatgtcaaaagcgctgcgctacggtgtggcaagaggggtattctccaatgaagccggattgggaagcctggcggtgctgcacggcgcggccgggagacaacggccgaagaacagggaatgtgggctatatttgaagtgtttttcgatacaatcatcagctgcacattgacggcccttgtaattctctgtattgccggaaaaagcggtgcggcgggaggcatgttttacgcagacgggcagacggacggaagcgcgatgatcgccgcctgtttctcccagtgttttggtgcggcggggggctatctgacggctatatctatggccctgtttgcttttgccaccatcattgcatggttttacctcggcaggcaggcagtcgcctatctgacggagcataccggcgcaggaaaggtgtttctctgcttttacggattcgtatatctcaatgcggtgtttttcggatgtgtggcgaagctggagctggtctggaacctgtccgacgtatttaacggactgatggcggttccgaacctgattggcattctgcttttatcaagagaagtgaaggcgccgttgagaaataggagaaaaagataagaaaagataaagactcgaaagccagaccaaacgataatctgcacgctgcgcgcacaggtcaccgacttcaacaaaaaagcctctccagcagtgagaggctttttgatatttgaaaaagggaggagagctgatacttaaatcagctcgatattatgaaaaaaatcttgtaagcattgttaattgctatggtttaagtatatggggaaagatgaagaaatcatgttaattgtgtaaaaggttttttaatgatttgtgaacgaaatatgaacgacggaaggaaactcccccaatttccatcgcattgattctgctcattcagcgcctgtttttccatataacaggacagccggcctgggtacagcggtatttccagcctgcactgatgcagaagagagcagccgacagcagaccgatcataaggagcaggacaaaacggtagctgtttgtcctgtcatagataaacccgtagacgggaatcaggatgactgaggcaatcggagcgcccatggagactttagcaaatattttttcataatccttccggccgtagaatctaagcgtcagaataggggacaggaccatgataccggcgctgattaatccctggcaaaaggcggacatgcgaaagaggaggagactgctgccgctgagcaggtagccggccattgccaaaaaaccgattccaagaacgccgtagcacgtcttcaggctgccgattctgtcgctgattactccaattgcgattgaaccggccgcgctcccgatggaagcgtatgcaagggcattgccggtctcggctgtggtgtagccgagtaatgctccgtaggtaggtatatgctgtgtaaaaacgccaataccggtaatggaaatcataaagaacagcagcaaataaaaggaagccgagtgcaaagccattttttccggtatttccactaaatcagattccttccggcctgcgctcctgtcagcctgtgtcccggtccggtaaggagacgtggatttatcctcgggcctgtttcgcagaaagagaacggaagaaagaagaacggcagtcagcgtaacgcccccgacaaataaatacccggcgcgccagccgtgaacggatattatttttgaggcagcaggctgaaaaacggagccgaataagccgacaaaggccatctgaagtcccagcatcattcctgtatttcctgcgaaccagcggttaatcaggattggccccagcagacttaccagaatcgtggatcccattgcataaggaaccgccatcagataccagccatagaccgaattcataagcccgaaggacatgaaagaaagcgcctgcagaacggctccggctgcggctacgagccggacgtcataccggttgataagccgccctgccagcggaagccataataccatgacaatggaagtgatgcttaaataaatggacagagtccctattccaacgccgatatcgcgtgacacgggatacagaaaaagccctgagaccgaattgattcctcctccggcaaagccgcggatcaggataacgcccagaagaatgatccaggcatagtgcggttttttgtttttcataagatttaaacgctttcttcagagcgatccttcctcaaattttacggttattgttgtctttttttcgatttttattcgttactctgcggagcggtttttatttaacaggagaatattcctgataaataaaaacaatccggcaattcttcaaatagaaaaattgaaccggattgtatacataaggccggcatttgctgccggatttattgatggcggtgacctgtgcgcggagcgtgcatgttatcttttgcgatgctctatccatccaatcacatctccgatcacctcatccctgcaatattcattgaatatttcatggaacagaccgccgtaaattttcatctgtttatcggaagaaggaacggttttaaagaaatcataggtgtcctgtacatttacaaggccgtctttttctccgtgtagcatcaggacaggatatttaaattctttgatgctgttttcaaaccaggtgatgccgtcgcagatggcgtaacacagacctgttgtgaaggttttcgtgttataaggatcttttccgtaccagtccacaacctcctggacggaacaaacgccggcgcccagttcgtttggaagctgtgtatggggatccattcctttcggaataccggtgataagttttccgttatccctggtcagggctccgcttgtgatgatgccgcgcagctttttgtccggatacttggcgccatacagggcaacagtgaagccgcccatactgtggccgatcagaaatacgggaacgccgggattctcggcaatcgccaaatcgactacaacgttagtgtcatccagcaattcattaaagtccgtgtaataggtgcgctctccctcggaacgtccgtggccgcggtgatcaaagcggtaggtgccgattccggccttgtggaacagcccggaaaaatagtcgtaccggccctggtgttcacacagtccgtggacaatgacggcgacagccctgcaatccatgtctgtctccttatttaaatataattttgtgttgtcgtatgacgaaatcatttctcccatatgtaacgccctccttttgataatttaatttctgcggtgaacgcagaaaccgtttatgcgcggtataatgaccgctttgcagtcattataccatgttccctaaggaacatggagtctccgacggaaatcagcgccggatttctgcggtgaacgcagaaaccgtttatgcgcggtataatgactgctttgcagtcattataccatgttccctaaggaacatggagtctccgacggaaatcagcgccggatttctgcggtgaacgcagaaaccgtttatgcgcggtataatgactgctttgcagtcattataccataaaaacaaggagttggcgtcgaatatctaattcaaaatccgggtaataaagctgactgttcaatataaaaaccgcctgccgacttgaaaccggcagacggttatagattctctgattaaaccttcccctcaagacctttgtccaccaggatctgtttttcagggctgactttgggcggggccatctcaaaggaattattgaccacggtaaaatcgaagtatccgagccgggccaccggcttaatgcggcagatatccacctttccgtcgggaagaatgaattcgtcggcaatatgtattccgattacttctccgataatacagtccacggtggccagtgtgtctttgcccgggatgcggattgtctgaacgtatttacactcatactgaaccggagattcggcaacacgggcggcctgcaccagtacggaaggcgcttttgtaacctgggaatactcgaacttgtctttcgttccctccggaatttcaaagatggaagagcggttcatcgcgtcctttaaatcgtacgataccatattgtagacgaattcgccggtgcgctcaatgttttttaccgtatttttccgatcatccaccacattctggttggcggaaaagatgaccagcggcggatcgaaggtaagatttgtaaactggctgtagggagccaggttatcggtgccgtccggattttttgtggagatccatccgatgactctcggaacggtacaggatttaaacgggtttctggataagccgtgattattttttgatggttcgtagaacatattgttttcctccgtgaatgattatttttaacaggccgcagcgcggcatttacaacataaagactaaccaggatatcggcacaatgataaagaaggacaggatggtccgttccagccagatgataaccatatccttgatggaaacaggaatttcagtggccacaacacagggaattgtcgtggagaacatcaaaacctgggtgatactcatgacgctgatgataaaacgtgtcagctccggcgcatttacgacgaccaggacgggaaggtacatttccgccaggccgaggaaggccgctttagcggcaagcagaggctccgggatctgaagcagcagcgtaattgggtagaaaatatagccgagccagtcaaacacaggcgtataatctgccagaatcagcgccaccaggccgattgacatgaagtttggcagcacctcaaacaccagtccaaacgagttcttaatgtttttaagaatgttcggaagtacaggaccggcatctttacagatccggagtccttcgttccatgcggctttcaaaaggctcccctccagtttttcttccggatatccctctttttcctgataataggtctcaggcttagaagacagaggatagattctggctacaatggctgtgacgccaaaggtgacaatcagtgatatgaagaaaaacggagtccacaaatgcatgatgtctgctgtttttgcaacaataacaaaaaatgatacgcagactgtggagaatcctgtggcgatgatagaggcttctctcgtgttgtatttcctctctttgtacatttcatttgtaatcagcattcccacggccgtacttcccatgaaggaggccacggcgtcgacggccgagcgccccggggtcctccagactgcccgcatcagggggcggaggaactggccggcaaagtcaataaaaccataattcataagacaggtcagaaagatggcgccgattggaataagagttcccacctggactgccagcgattcgaagaggaagggcccgtgatccgctctcataatcggttcaggtccgacgccggaaaagacgattaccgtgaataccgctcccagtatttttgtaaaagtgaaaatggttgtgatggcgtctttgttccaggtcttttttatgaaaggcatggcagtggcgatgagaatgactgccagcgcatataatcgccctgccgccataaagtggccggtcagaaagctcaccaggtattcaatgggaattgtggtggctccgtttgacgggacagggacaaaaaacataaaaattccgatcaggctgagcaggacaaacttggctttaatgcctgggcttgtggtgttttccggtacttccggagtgtttttcatatagcacctcctaagactttttcattctgttccgttacctgcaaagcggccgcttagcttgtctttattatagtaaaaggataaagcgttatatatacacatttttgttctccattttaatttttttgacataagtgaaaaattgacaatgtttttagattatattatagtttgaagaaaaggcagcaataataattttaaataccgtttggaggaaagaatgaggagtatttgtctgttagataaaaacaatccggcagcgggacaattgcctgatatggagcttgcaaaaaaccgggaagaagttctggcgctgagcaggggccccggagactgctttctttttctcaggcagcaggatattgaaaatgactttattcagaaggtaaaggaaaataatccggggtgccgtgttatcatgatgatggaggcggctccggcaggaatggtgcttccctatgcctggcagggatatattgacggcgtttatttcctgcacgggcatgacggggaggaggagcttccggcggcggagatgtttaaagatatcctgtccatggaatatatccacgatttaatatacggtcatctggaaagactgacgaaacttcagcccatgttcggcctgatggagatagaaataaacccccagataattctgaccattgtttatgatgatttctggacaatctgtgagcaccaccataattcataccgctacaagatgaagcggaatctattgaacaggacgcgggaagtgcttcgcctggggatgaagggaattgccacgacattgataggaacggacaaggtggttgtggttctggattgcggcggcagaaaaggggaacaggctgaagattacgccactgcctgcgctgagatgatccgggaccatctgatccgggagactggctattccgtatcaatcggggtgagcagcttctgcgatacgaagggttttttatggagggcttatgaacagtccttccgcgccctggaacactctttccagaaaggcaggggacaggtgcttcattacagacagtcggttcccgtatacggggatgagggggcctccgaatcagagcagttcagccatgatctgattattgcagtcagcctcaaaaacgaagaatacggggaaggtgttctggaacgttttatgaatcttacaatcagccggaacatgggggcctcctatgtaaaatctctggcggttacaattctgtcggagacggcccagtactgcatgcggattggaatcgatgcggcggaaatatccggcagccttatcaatgtggtcaaccggatctttaaggctgcgacagtaaaggatatcaagggagagatgcagttatttcttcaatttgccataaacagggtcagggcgctttcagacgggggcggcgtactggatattgcaaaagcctatatcgaacagtattatatgatggacctcgatctggataaggtcgcatctatctgcggatacagcccctcttatttcagccgcagcttccggaaatatttcggcattaactttgtacagtatcttcagcaggtgagactcgataatgcgaagcagcttctcaaaagcagctctatgactgtggctgagatatctgagaagacaggatttcagagcctcagctatttcagcaccatattcaaaagggagaccggactttcacccaaccagtaccgtattggttaaagtctggacaaatcttctgcattttgctacacttataggacaagagcagaaaatcttaggaggaaataaatatgcagaatccaatcgttactattgagatggaaaacggcgacatcatgaaagcagagctttacccggaaattgccccaaatacagtgaataattttatcagtctggttaataagggatactatgacggccttatttttcaccgcgtaattaaggggttcatgatccagggcggctgtccgaacggcaacggcatgggcggtcccggctattcaatcaaaggagagttcagccagaatggctttacaaaccagtttaaacacaccaaaggggtgctttccatggccagatcgatggctccggattccgcaggttcccagttctttattatgcatgaggattcaccacacctggacggagcctatgcggcttttggcaaggtgacggaaggtcttgacgttgtggacaaaatcgccgccatgaggacggattggaacgacaggccgatgaaagaacagaagattaagaagatgacggcagagacgttcggaacggaatatccggaaccggagaaatgctgattgtaccggtgatcagacggaggccggccggaaagactgaagaatagaagatatgacaattgtaaaagaagtaacagtagaaggaatcagatatccggtcactgtttcggatgacaacgaggctcttctggccgcagcagcggcgggaagagccattattgggatatgggatccctccgtgcgccctttagggcagggtttgacgcatgcctctatctggtttgtgagatggaggcggcggacgatatgcttttggaaaaggcagtcagaagacaatacggacttccatggattatagcgcagacaaagcgtcttctgatacgggaatttacaaaggacgatccgctggaagccgaatcggccgacgacggggacggtgtattctctgaccgtgccaggagagaggattatattgacaatcagtaccggttccatgaatgcgggctttgggccctggttttaaaaaagagcggtcttattatagggaaagccggaattacgcaaggggaactggggtatcatatttacgggccgttcaggggccgtggatacgcttttgaggcatgctctgcgatactcggctatgcggaggaagagctggggcttcgtcatgtccggataaaaaccggggaagggaatgaagcttccgtccgcctggcagaggccctgggtttttcaaggacggaggatacggggcagaagagtgaggggattcttacgtttgaaaaatatatgcagacagatatgcgataaacagtaatagtttatgctgtttaaactatttcaataaacaaaagaaaggcattaataatggcatcaaaattatttgattatgacaatcccttctttatgttcatgtcgaggatatgggatttaatgattctgaacttccttgccgttttactctgtcttccggtcataacagccggggcgtcggtgacggcattgtattatataactcttaagatggcggaagacagggagtcgcatatatacaggagttttttgaaagcattcagggacaatctggtacagtccacggccatccatctgattgtgacggctgccggggcggtgctgctgcttgatttctggtattttgttctgggggcagagcgccgggagcttcagcctccgatatcttttccgccggcatattttcttccggcagcccggcgcgctttgcggcagccgccctgctgctggctctgatgctgctgtatctttttataaccgtatatgtatatgccatccaggcaagatttgtaaatacggtcttcaagacgataatcaatgcgtttatgatggcggtacgccatcttccgtccactgttctgatgataatcctgaactccgtatttttttatatcatgtttcattatgcttcatggctgggattctgggtgctgtccggcccggtttacctgaattcactcctgctttgcagaatatttaagaggtatatgcggacggatgcaaaagaaattacagaaacagacaaaaatacagccgaatagtattgtattttgtatgtacggcgtatataatatattgtatacaaaaaaatgcgttgatacaatttactacgaaaggaaaagaccggaggaatagaaatgataaagcacctggggcttaaagcctacggtaagattaatctggggcttgacgtggtccggaagagggaagacgggtaccatgaagtgcggatgattatgcagacggtgcgcgtgtatgacaagattgacctggtgcgcagcgaacagcccggaatcaggctggaaacaaatctctattatctgcctgacaatgaaaacaatctgggctacagggcggccaagcttctgatggacgagttcggcgttacggaaggcgtggaaatcaagatgaagaaattcatccccgtggcagccggtatggcaggaggaagcagtgatgcggcggcagtcctgttcggagttaacaagatgttttctctgggccttacaacggaacagctgatggagaggggcgtaaagctgggagccgatgtgccttactgcatcatgagagggacagcgctttccgaaggaattggggagattcttacgccgctgcctccgatgccgcagtgccagatcctgatcgccaaaccgccgatcagcgtttccactaaatttgtttatgaaaacctgaacctgccttcgctgtcccgggatgcacacccgaatatcgacaaaatagcaaaggctctggcatccagggatttctacggagtggcggataatctgggaaatatactggagacggtgacgataccggctcacccggtcatccgggaaatcaaagaaaaaatgatggaactgggagctgtaaatgctctgatgagcggcagcggacctaccgtgttcggattgtttgtaaatccggctgctgctcaggaggcatatgaagaaatgcgctatgggagtgcgaaaagcctctcaaagcaggtatatctgaccagcttctataacaacaaagcaggaaaataattaggacaggggaattatttatgggaaacaattttgaagtgaacatgaatgagtacctcccgctgagggatgtcgtattcaacacgctccggcaggccattttgaaaggggaactggcgccgggagagagactcatggaaatacagcttgcagaaaagctgggagtaagccgaaccccgatccgcgaggcaatcagaaaactggagctggaaggcctggtactgatgattccgcgtaagggagcggaggttgccaagatttccgagaagagcttaaaggatgttttagaggtaaggcgttccctggaggagctggctattgagctggcctgccagcggatgacggattccgatctcatggaaatggagagggcgggaaaggcattcaaggacgccgttgacaatggaaatgccatggagattgccgagacggacgaggcttaccatgatgtaatttataattgtaccaggaacatgaggctggtgcagattttgaataatctgagggaacagatgtaccgtttccgtctggaatatatcaaggatgaggacaagagacagattcttctgattgagcatgagaagatcctgagggccctcaggaaccgccatgtggccgaggccaaggcggctgtgcgcgaacatattgataaccaggaaatcacggttcttaagaatataaaggagcaggaagaatgacatttaaagagctatatttgtcaggccaggttgaatttgaggaaatagacaggtttatttccaggtggaataattccgatgatgaaagaacgcttgcaaaatatctgggccttaacgcagaggaagaggacgtctggatcgatgacagcgatgaagcgcttcaggatatgctggattcttatgaaaaggtggccgggactccggtgacgctcggcagaacagggattatcgtcaataagaacggttttggcgcccttccgatgcagcgggtatccatggaggcggccagggctttgcttcggaaagcttacgatgcagggatacgcttctttgatacggcgagggattacaccgacagcgaagagaaaatcggccatgcgctgagcggcgtgagggataaaatttatattgctacaaagacctcggcaaaaacggtggataaattctggcaggatttagacaccagtttacataatttgaaaactgactatgtggatatttaccagttccacaacccggcattctgtccgaagccgggagacggcagcgggctctatgaagccatgcttaaagccagggaacagggcatgatacgatatatcggcattacgaaccacaggatggctgtggcggaggaggcggtggaatcgggactctatgatacgctccagtttccgtttaactatctgtccacagagcgcgaacttgccctggccgagtcctgccgtaagcagaatatgggctttatcgcaatgaaggggctttccgggggccttattacggattcagcagtgatttatgcatggatgctctcttatgaaaatgtacttcccatctggggcgtgcagagggaggcggagctggatgaattcatcagctatatcgataatcctccggagcttacggatgagcggaatgccgtaattgaaaaagacaggaaagagctggcaggctcattctgccgggcctgcggttactgtctgccatgtccgtccggcatcgagattaatctctgtgccagaatgtcgctcctcttaagacggatgcccccggatgattttctcacggaggaaggccaggcgaagatgaaaaaaatcgaggactgcgtccattgcggacaatgcagggctaaatgtccttatggactggacaccccgactctgctggaggagaattataaagactataaagaagtactggctggaaaaacagtccggaattgagcagaatcttactgtgctaaataaaggtaacagtttaggcggggcgctgttactaaaacatatggagatttaactgaggtttggaggatgcgtcaggaacggaccatgtccggtgtggtgagggggatggctgagtcttccgtccccggttgaaggtggtcgtgagggggaatccggccggaatgaattcttacggggaccgtttgcacttttcgaagcgcatagccgtgctaaattcgtgagaaacctcattaagcacggatgggcttccatatcccctccagaattgattccgcctacttcccccgttcaggtttttgccggggacggaagacccaggcggaggttttcgtggcaccggacatagtccgttccgggcgctgattgtctctaaccttaaatggggaggaccctgtcgcgaccactacgtgtttccggcaggccgatatcaaatcctccacaattttatataaggcgtattgaaggcatatcgtatttcccacacacgttgcactgagtggcctcgacaaggtccgcccccgcacttaacgcgtgagacactcagcggccgcaggccagtggacggggccgatacacttggcggagtctttcgtcccggcgaaaaccttccgggagaatgagatactgccgacatcttccggcggagaaggagagaatgatatccggaaggacgttcgcccgagagatgatagctcttaggcagagggagacaaagcgcgccgggcggattttagccctacaagggcaaaatccgggacaacttgagcttcgaactcattcggagttcggagcgaatttgtccgtaaccccgggggctttgccttcctctgtcttagagctatccctcgaagaagcagtccagccggatatcattctctccggctccgccctgcgaaaaaaaaccacagtatctccttctccatccagcgatgccaaaccccgggacgaaagactcatatacactccccaaccaccccgtccgccggccgttccggcggcgtcctcacctgcttaactaaatctccaatcagatctcagcagtcccctgtctgaattacaaataaaattaaaattatattaaatttttataagtctcttgacaaggtgacaggctgtcactataataatgacagcctgtcacctttttgcgatatttttacaccggtatacagtagaatatcggaggggccttggcagccatactgaagataagagtaaataacaggggggaggaagacttatgcctacagaacggttttacagacttccggaagagaagaaaaggagcatctgcagcgccgccgtgaaggaatttgcgcgggtgcctctcgataaggtatcaattaaccagattattaaagaggcggatatatccagagggagtttttatacatattttgaggataaatgggatctgctggcgtgcattttcgaggacagccagaacagactgagagatttttgcagggaggccctgatcacgtctggaggaaatatctgggttatgctggaagcgctgctggacaggacgattgaattttgttccggtaaaggccagtttaaattcattaaaaatgtgatgtatcatacgggttcagaggagatcttaaagggcttttcaaaaaggatgaatgatacatacggccacaagaatgaagagatagagaggtggatttttgaaaacacggacaagaaagtgatgatggtggaagattatgaggtgttccactgttttttccagcttgccatgttaagtattgcgatggaaatcaaagactattttgacgaagtgcctgtggatacaatcaaatcccgttttgccacaaagctggaaatcctgaagaatgggatatgcaggaacggttcagaaggacgggccggaaattcatgaaagacggatagaataaaaaggctgcaatatatttaatcatagaaaaataatcatagaattttgaagcgaagaaagcagacgaaacaggaggacaacatgaagaagaaaaaagtaatcattacagcggtagtgattgtggcggcagcagcaattatcttgcccagatttttgaaaccgaaggaggaagttgcagcggcttctgttccggtggtctctatacagaagccggagattggaaatattgaattgtatacaggcctgaccggcacggtcgagccatcagatattgtctacatcattccgaaggcggcaggcgaggtgaccgacgtctatgtgaaggcgggagattatgtggaggaagggcaggagctgctccatattgatacaaaacaggtggacggggcaaaaatcaatctggatacggctgccgtttcccttcaggatgccaatacaaacctgcagaggatgagcgttctgcttcagagcggcgacatctcacagcagcagtttgagcaggtgcagagcagcgcaaagatggcaaagctccagtatgatgcggcaaagctggcttatgataaccagattgagttcagcaccattacggcgccaatcagcggccttgtggaaagctttaacgtggaagtacacgataatgtggcccagtctaacgtactctgtgttatttcaggggaagggacaaaggcggtgtcgtttaatgtgacggaacgggttgtagacggactcagcaccggtgatgtgatccggattgagaaaaacggcagtgattatcacggtgtgattactgaaatcagttccatggttgatgcgtccacaggccttttcaaaattaaagcatcccttgaagatgcggattccctggcaaccggggcgcaggttaagctttatgttacatccagcaaagctgaaaacgttatgatgattccgacagatgctatttattatcagggcggaaaagcaatggtttatacatataaggataacgcagtacatgaagtgcctgtggaagtaggcatttacgatgcggagaagacagagattacgggaggactcagcacggaggatgacgtaattgtcacctggagttccgagctgtttgaaggctcgcaggtagaaatcctcggcgcatctggaactgccggagaaagcacaacagacggcgcatcatccggtacggcggaaaacacgacagaagcagaagcggaataaggaggcactcacatgggattaacaagaagcgtcctgaaacgtccggttacgacggttctggcagttctctgcctgatcgtatttggtatttcatccatattttcatcgaaactggagctgactcccgagatggaaatgccgatggtagtcgtatttaccgtttatccgggagctaacccggaggacgtcgatgaactggttaccaagccgattgaagatgagatcggcactttgaacggaattaaatccgtaaacagctattcaaatgaaaacatgtccatggtgctgctgcagtatgaatacggcacggatatggataaggcatattccgacttaaagaaaaagacggatgccatgcagagcagcctgccggatgatgtgcagactccgactatcatggagttcaacattaatgaccaggcgacgatgtatctggcggtaaacaatgataaagcagataatctttataactatgtagatgagaagatcgtcccggagctggagaagatatcctccgtagccagcgttgacatcagcggcggacgtgaggagtatatccgggttgaagtgatcccggagaagcttaagcagtatcatctcagcatgaattccctggttacggcagtcgcctccgccaatctggcttatccggccggaagcaccgaggtggggagccagagtctttccgttacaacaggcgttgaatttgatgatatggagagcctgaaacggatcccgattacggtcggaaacggcaatacaatttatcttgaggatgtggcaaatgtctactccacgttaaaggatgccgccggtatcggccggtacaacggccaggatacggttgcgctgggcataaagaaacagcagaaaagctcggccatggatgtgtccaaagcagttaacagaacaatttcacgattaactgaagtaaatccggaccttcaaatcgttgtagtaaatgacaacagcgatcagattaacggctcattaatcagtgtattgcagacgatgattgcggcaattatcgtatcaatggtggttattttcctgttcttcggagatttaaaggcgtccctgattgtcggaacgtccataccggtgtctatcctggcggccctggttatgatgagggtcatgggattctcgctcaatgttatcactttgggaagcctggtgctgggtgtcggtatgatggttgacaactcgattgtagtactggagagctgtttccgttccacaaaaggaaaaggctttaacgaattccataaagcggccctggaaggcagcagcatcgtaatccagtcgattatcggctcaacggctaccacctgcgtcgtattccttccgctggcgttcctgtcgggtatgacgggacagatgtttaaaccccttggcttcacgattgtgttctgtatggttgcgtcactcatttcggctatgacgatcgttccgttatgctacatgatgtaccggccgaaggaacggactacggctccgctttccggtcttgtgacaaagatgcagaacggatacaggggtatcatgaagtcgcttcttcctaagaagaaaacggttatgtttacaacagtagctctgctggttatttcccttttcctggcgacccagctcaagacggagctgatgccggcaaatgaccagggtaccatatcaatcaccgtcggcttaaggccgggtctgggaattgagaaagccaacgagattttatcagaggttgaagaccatgtggcaaatgacgaggatgtggaatcctacatgctttcctacggaagcagcggactcagtatctcgggaggctcttccgcctcgctgacagcatacctgaaggacgacagaaaacgttccacaaagaaagtggttgatgaatggaggccggtgctgacctcgattcctgatacgaatatcacattgtcttcccagagtgccatgagtatgatgggaggcggaaacgaaggcgttgagtatatcctccagagtacccagtacgatgagctgaaggcggcgtccgataagattgtccaggcgcttaagaaccgtcctgaggtaacaaggattcattcttccctggaaaactcggctccggttataaagattgaagtggacccgctgaaggcagcggcagaaggcctgactcccgcgcaggtgggaggtacggtcaacctgatgctcagcggcaaggaagctacgactctcgatgtaaacggcggcgaaatcagcgtcatggtcgagtatccggacggcgaatatgatacgattgaccaggtgaagggaatcgtactcgataccgcgaccggcggttccgtggcacttaccgatattgccgacatttattttaaagatagtcctcagaatatcgtcagggctgacaaagaatatcaggttacgattaccggtgatttcgtgaagggcattgcaaaggacgatcaggatgcaatagagacaacaatttacaaagaagcagtgcttcccaacatgtctgagagcattaccagggctcagaacagtatggatgaagcgatggcggaagagttcggcgcacttgcgggagcaatcggccttgccgtcttcctgatcttcgtagttatggctgcccagtttgaatcaccgaagttctctatcatggttatgacgacgattccgttcagcttgattggttccttcggactgatgttcctggctgacgctaccatcagtatgccgtcccttttgggattcttgatgctggtcggtacggttgtaaacaacgggattctttatgttgatacggcaaaccagtacaggagcaatatggaccgcgacacggccctgatcgaagcgggagccacaaggctccgtcctatcctgatgacaactctgacaacgatagtagccatgattccgatggcgcttggaatcggcgacagcggcgagatgatgcagggtatggcgcttgtaaacgtgggcggcctgctggcttcgacatcattgtccctgctgatgctcccgatttattacacactgatgaacagaggtcacagggaagaattggatgtggattaatggcagaagtgtggtaaaatggttttgtaacaaaatataggaagtatgcggctgtacccggcagggacagccgcatacggatagaaaccgtggtcagttaaacgttattgttcacaccccgacaaaagacggcgtgctgcgaacaataacacgcttcgcgatgcacagaaacggcaaaaagcgccgtttcgcgccgtgcaactcgggatttttgtgcataattcgcacgaaaacacctcgcggaatacaacctgtgaacagtagcagttaaactgcggaggtgagaaaatagaatgaaaaaaagacggaaacagataactgcggccgccctggctgccctggcagcgatatctctgacagttcccgcttatgcggccgcagggccttcaggaaagacgacttacataaacggggcgggagccggtgccgaggatacggttctggattacaacgacattgaccagaggattgaaaactacaacacgaattacaagcagcttaattcgactctggtgaatagcacccagtcgctggacgcggcaagagaattgagagaaggtgcgtcggatttgatggatgaagcttatgagcttcgttctgacggccttaatgagaccacgagggagctttatgacagctacaaggagtcggcaaaggagctgcgcaaacaggcccagaagctgacaaacgaggagctgggaagctcttacaagaagacactcagacagacgaaaagcaaactggttgcttccacccagcagctgatgatccagtacagtgagacgattgccaagcaggagctgatgaacaagcagatagaattggcccaggccaatctggatgcggcaaacaggatggcggccatgggaatgaaatcggtccaggacatccagacggcccaggaaaccttaaaacaggcggaaagcggcgctgcccagcttaaatacggtattgacaatatgaggcagaatctgctcatactgacgggatggaaccatgactccgctccggaaatacggccggtaccggcctccgatctgtcgcggatcgaccagatgaatccggagaacgatctccggtcagccataggagccaactacgatctccagtcgctcaaaggagcttccgcctccggttcctctgcgagaaacgtgaagaagaggaatgtggcacagtcggaacaggatgtggcgtccacgcttcaggccctttataatactgtcatttccaaacggcagtcctacgaggcggctctctccgaatatgcggctgcggagcagaaaatgcaggcggccgaccggaaatattctctgggaatgatgggaaaacttgagtacctgagcgcccaggcggaatttcttacatcgaagtcgaataaagaagttgcagacatagaactattttcagccatggaaaagtatgactgggcggtaaaaggcctgatcatgtcctaatagtaatgcagaaggagagtaaagatgaaacacgataagaaggtcttagttctttcgattttgacagcggcagccatgactgtcacgtcacctctgcaggtaatggcagagaacccggagtttgcccatgacgaggcgacctgggcccggctgcgggacaatgtgatggaatatgatgagcttcagatgctggtggaggaatacaatcccacctacatgaataatcaggtttcctataaggattccaggacaaaggacgatgcggaaaccgtaagacaggatttgaaagacgctgccgacgatatgaccagtcaggcggaagacatgagggacacggctgattcccttctggatttagccaattccctgcagaacatgtctaaagaacaggcggacgcagtgcttaagcaggcaggcattaacagtgtaaacagcttaatgtcctcctacaatgccatgtatcttggcgcggcgatgatggataacagtgcaatgaagcagaatatttccgccgacagccagtacgacgacgacgagtccagaaaactcaaatatcagaaaacgcagaacggtctgattatgtcggtgcaaaccatgttcgcctcttataaccagatgaaaagcagtctggacgtaattcagaaaaatatagagattatggaagcagtccagcgctctaccgagacgcgtgcctctcttgggatggcgacacagatggatatactgacggccaagaaaaacgtgcagtccattcaatccacctatacccagacccgtacctctttggattccgtaaaacacagtctctgtctggccacaggctggcagttcaacgcagaccctgatatcagggaagtgcccgcggcagatatgaacaggattgcggcaatgaatccggatgtggataagcagactgctcttcagaacaattacgatttaaattataataaaaagattcttaagaatatgaccgagggctctaccgataaaaagaatatggagcgcacgatcaaaaatctggaggagacggttgccgcctccatggtgaatttatataatgatattctccagaaaaaaacggcgtttgagctggcagaagccgcactggctaccgagacaacggcgatgaatgccatggaaagaaagtaccagcttggcatggcaagccagctggactacctgcaggagcaggcggccttcctgggcaaacagatcgaccgccagacagcggagatatccctgttccaggcgatggagacgtatgactgggctctgaagggcatgctttccaccgggaactagagcctgtttggttcgtccggtcagcgcggtacctggacagacgggtagccggcacagatatatattttaaatttagtctcgcgatagtaattctgcaaggcggaaacggacgcggacggtaactttttcggaagtttccgtctgcgttttttgtttggtatcattaaaaacaacccgtctgctcttcatcagatcgcggtaatcattgtctgtaagaaggtttttcagttcctgctttgaggagtcgggaacctcgcagacagaagactgggaaaaacacaacggcggataaaggacgcaccaccagttgtttccttgtccgcttcccaaaagaacccggaccgcatcgtagtccccgcaggggaacgtgacgtcaccgtagactttggtcggaaaatagcagcgttcaatccggatatcggccggataggcatagccttcggaacgcataaatgattcggcggtatgttccagctcttctttgtgttctgttacgtaggaaatcaactcatccttagacagctcccggccgtctaaatcttcgtacatagtgtcaataagaagctgttttacttccagcttcaggtcctggtcttccttactgttgctgttagccagaacatggaagcgcagaatctggggagccagtcctcttgacaggctctcctccgcctttctggcctggttcaggaccagcggtactgaaacaagcagagtgagggagagggcggcgcttataagtagagccgcctttcttgaagtcccttttgataatttattcatataatatgtaatgtgtggatgtgacattggtaaacctccatggctgatatatttcagagctgctttattccagttactgctttatttcttacaatttatttcatatttttatcttacttaccccaagtattgacagctgtgttataatctaaacagtttaaaattatatccgatagaaaggcagattaaatcatgataaaaaagagaattctcgttattttcggcggacagtcatcagagcatattgtctcctgcatgtcggcagtaaatgtgattaataatatagacagagatacatatgatgtccttatcgtgggaattacggaagagggacactggctgctggtagattcggtggaggcgattcaggatgaaagctggagagatggtacggttcaggccgttctctcgccggatgcaacggaaaaaagtgtcattgtcatagacggggccggaataaagaaaatcaaggtagatggtgcatttcccgtgctgcatggtctttatggggaagatggtacaatccagggactttttgagctggcgaagctcccatatgtcggctgcggagttctggcttccgccgtatcgatggataagttttttacaaagattattgccgacagggtaggagtgcggcaggcagcctatgagccggtgatgaaagaggagattgcaggtacagagggaatggccgaagcggtgaaacgggtggaagcacggtttgcttatcctgtatttattaaaccgtccaacgcaggctcctccaggggcgtatccaaggctgaaaacagggaacagctcacagagggtcttaccgaggctgcacgccatgacagaaagattctggtagaggagacgattgtcggccatgagattgaatgcgccgtattcgggaacggaaaagagccggtgattgcatccggcgtcggtgaggtcctggccgccgcacaattctatgattttgaggcgaaatattttaatgcagagtccaggacggttgtaaatccggagcttccgggtgacagcgccgagagagtgcgccgtgccgccgtggagatatttaaagcggtagacggctatgggcttgcacgggtcgatttctttgtcacgaaggacggcgacgtcgtatttaatgaaataaacacaatgcccggatttacggcgatcagcatgtacccgatgttgtttgaggcggccggaatcagcaagacagagttggttgggaagctgatcgagcatggaatgaagcggtattaatcggcgtgcgagttaaggcattgagttaagcgccgtgtgtaagcatacggtacaggtgcagaatacatgtgtgatacaagtataggaatcagatggaggaatcagatggacagaaatgcgccgattggtgttttcgattcaggggttggcggtcttaccgtaatgcgggagattatgcgtcagatgcctgacgagagaattgtatactttggagatacggccagggtgccttatgggaataaatcaaaggagacagtgattcgttattcgcagcagatcatccgtttcctgcagacaaaagaggtgaaggcgattgtaatcgcctgcaatacggcatcagcctgcgcccttgaggcggtggagaagagcctggatattccgattatcggcgtgatttcggccggttccagggcggccgtggaggccaccaggaatggaaagattggaatcatcgggaccgaggccacgatccgcagcggagtatattcggaggagatgaaacaacttagaggggatatcgaagtgacaggtaaaccttgcccgcttttcgtcccgctggtggaagagggactgcttcacgattcggtgacggatgagattgcatcccgttaccttgcgtgcctgaaagggaaatatattgatacgcttgtaatgggatgtacccattatccgcttctgcgctccacatttaagcgcctgatgggcgatgatgtaacgctggtgaatccggcttatgagacggcagtggagctgaaggggctgcttaaggagaaggggatgacccgcggcgcaaagtcagaaggcgtggaagataccagagagcagtaccagttctttgtaagcgatttggctgagaagtttactaattttgcaacgtcgattcttccacgagaagtcagggagacaaagaagattaatattgaggagtactgatatgacgaaagatgtacttgtgagtatcagcggagcgcatatggttgacggggacagcgatgatgtatccgtaataacggccgggagttatttctgtaaaaacggtaaacattacgtaatctacgatgaactgattgacggcgtggaaggtgcaatccgtaacacgattaagatcagggaggatatcgtagagataatcaagagcggaagcgcccgttcccatatgatattcgagaaagagaaaacaaatgtctgctgttacgccatgcccttcgggcagattatggttggggtgaatacagataatattttattggaagaaaaaccggatcaactccgcgtggaaattgattattctctggacgtgaactatgagatggtttcccagtgccacattgtgatagatgtgcggtccaaggcgttggcggatttccggctaggggaatagccgggtcttgtagggaaagaagcggtaaatactgggatttaagaaaaaataagaaaatattaggaataacttactgttagaatgggagggggaatattgacctcccataaaattggtgttataatttacgaaactcagaagattgtataatatcgtatcgaaagatgtcgcttaatatatctgttaagcgacatacgtttgaacagcatttgaaattgaaatgcaggatgcagtttcatcatggatgttcagcacgaatgcggttatattaatgaagatacatcttttgagaatacaggattataggcagatgacgtgaagcattggcacacagattccgggctatatggtaataggggataacaacggcagctgcacgcgcaatttgtattttgcattgcgtgtagatggcgaagcttaccctattttacctgaaatgaaacaacagctctggacgcttccgcttgtgcgggaaggaaaaacgacagatatgtggtatgtaatacaagtccagggggacaggaggagaagacggcggagctgatcaaaaagcagttgacgctctgtgatgacagcttgagggaatgctttataccgaagaaagaacgggtgaagaaatttaaggggcgctggcagcaggttgaagaacttttatttccgggatatgtgtttgccgattcagggaacgcggaggagctgtacaggcggctgaaacaggttggcagattgacgaaagttctgcaggacgggaactttctttttttgtccctttcagaggatgaagagcagaggattaaagcaattggggactgccgccatgtgaccagggtatccaaagtccaggttgtgggggagagtacagcggcagggctgatggaattgacagaggaaagaatgtagttgtccgggaagggcctctgaaggggctggaaggatatgtgacaaaagtgaacctgcataagcgtgaggttacggttcaaatgccatttgcggggagaatgctggatgtgaagcttgggattgaactggtggatgagaagacactataaaggaattgtgataatagattatgtatataaaaattaaaagaattttggatattgtgatttcaggtgcagggttgataattttatcacccctttttttattgctgattttagctatcaaaatggattccagaggcccggtactgttcaaacagaaacgagtgggaattcataaaacatattttaatattttaaaattccggactatgagaatcgatacgccaaaggatatgcccacccatttgttgacgaatccggaacagtatataacaaaggtggggaagtttcttcgtaagacttcgttagatgagctgcctcagattattaatatattaaaaggtgacatgagtattgttggcccacgtccggctctgtggaatcagtacgatttggtggaggaacgtgacaaatatggggcgaatgatattcttcccggcttgacggggtgggctcagataaatggcagggatgagctggagatatcggtgaaggcaaagctggatggcgactatgtaaagcgtttgggttttcagatggattgtgtatgttttttcaggacaatcacttctgtgcttaaaagtgacggtgtagtggaaggcggaaccggagtgccaggtcggaaaaaagatacgggtagaaataaataaaaagattataggaagataaatatcagggagaaaaaactcatagaaggtacggcagacaagaaagcaacaagattgggagagcgcttaatgagaaaaatattaatagccggagccgggagttatatcgggacttcagtggaaaaatggctgaatcatccgcagttttccggaatgtaccaggtagatacggtagatatgaggggagatgagtggagaaaaagaaatttttctgggtatgatacggtgtttcatgtggcaggtattgcacatgcggatattgggaaagtatcagaggaacagaagaatctctattatgcggtcaattgcgatttagctgtagaaacggcagagaaggcaagacgggaaggtgtaagacaatttatatatatgagttccattatcgtatatggagagggaactactgtccgggagaaaagggtaatcacgaaggggacgaagccatctccttctaatttttatggggacagtaaatggaaggcggaggagacgctttctgttatgactgatgggcccgaagggccatttcggattgtaattctgcgtccaccaatgatttatggcgagaactgcaaagggaattatcaaatgcttaagaaatttgcgcttaaggttccggtatttcctgatttcccgaatgaaagaagtgtgcttcatatcaataatctctgtgagtacgtgagaaatttggtggaggagcagaaagaaggcctgttttttccgcaagatccagaatacataaaaactgcagagatggtaagagagattggggaaaagtatgggaaaaaagtgtatctggtcaaaggctttaattggggaatttatttaatgtcatgtctgccggggaaaattggtgggatggtaaacaaggcatttgggagtcttatatatgaaaaagaagaaagttttattaattggaaaccatgaaatagttatttataattttcgcttagagttaatagaagcattgcttaataaaaattttgaggtgtttcttatgctgcctaaaggcgaaaaaacaaagatatttgagagaatgggatgtcattttatagacacacctcttgagaggcatggggtcaatcctttttctgatttggttttgttttttagatattatcgttctattaaaatgataaatccggatatgattttgacatatacgataaagcccaatatatatggtggactgactggtcggatgctgaaaattccttatgtaaccaatattacaggattgggaagtgcagtggaaaaagagggattcttgcaaaaaatcaccattttactatatcgggtggcactaaaacaagtacataaagtttactttcaaaatgaggaaaatatggcattctttaataaacatagaattgctttaaaaaagggggaattacttcctggttcaggagtcaatttacataagtttaaagcactgccatatcccgcagaagagtcacttcattttatatttatagcgcgtgttatgaaagaaaaaggaatagaggaatatcttaaaacagcgaaatatataaagaaaaaattcccacatacaaattttcatgtcttcggcttttgcgaagaacgatatgaaaaaatacttcataaatatgaacaggaaaaaataataatttatcacggtatggtagataacatacaggaatacattcaaattgctcactgcactattcatccatcatattatccagagggaatgtctaatgtttgtttagagagcgcagccagtgcacggccagtcataaccactattagaagcgggtgtagagagacggtgattgataatgtcaccggatttcttgtagaaccgcagaatacagaaatgttgataaacacagtggaaaaattcattaacttgtcttatgtggaaaaagaaaagatggggttggcagctagaaaatatatggaagaaaaatttgatagaaaaatagttgtcgataaatacttaaaggaattagattaaagaggagaaaacaatgccggtacggatactacatgtattgggtggactagggcatggcggagctgagagtatggtgatgaatttgtatcgctatatagatcggcaaaaagttcagtttgattttattatttatgaggatgggaaactggattataatgatgagattatttctttgggaggaaaggttttcaaatcaccgcattataatggcgccaatacatttgagtatattaagttttggaataattttttgagttctcatcaggaatattcagtgatacacgggcatgtgagaagcaccgccagcatctatctattaatcgcaaagaagatgggacgaaaaacaatcgcacatagtcacagcacttctaatggaaaggggatttccgctttaggtaagaaaattctacagtatcccatacgctttatctcagactaccagatggcatgttctattagtgcaggaaaatggttattcggggaaaaggtgctgaagtctaaaacttttttaattataaataatgcgatagatgcagataaattcaaattcagcgcagatattcgtgctaaaaagaagaaagaattgggatttaaagaccaatttgttttatgtaatgtaggaagattggtatatcctaaaaatcatgagtttatattgagcatttttgcaggtcttgttctccgttgtcctgagacagttttattgctagttggagaaggagatctggagttaacattgaaacaaaaagtgaaagaaaaaggattagaggaaagggtgttgtttttaggggatcgctccgatatttctgaaattttgaacgcggcggatgtctttttattcccatctctgtatgaggggttgggaattgtagcagtggaagctcaggcggcagctttgatgaccatttgctctgataaaataccacaagaagtgtttataacaccatatatacagagtattagtttattggaaacggaaaaaacgtggattgatgctattttgaaatatcgagaaggatatgaacgggaaaattgtgcgcagataatcaaacaagccgggtacgatataggtagcacagcggataaaatgcagaagttttatataaatttgaatagttagaggaaaaaatggtagatatcatatataaaaaaggaattatcgatgtaagacatgtctggttttgtgaaaaattactgaagagcaggaatagcatgattttttatcatggtattcaaaatattgaaccattcaaaaatagaaaaataatagttgaaccacagcattctctcattatggatcttactgcagaccgagaagagatatatagcaatattagaaaaaaaataagatatgaaattcggagatgtcaaaaagaaaatataacatttagatattatacaagtaaacaaatgcagggtaaagatgaactgttacatacatttcagcggacttatgaagagatgtatcaagcaaagggaatgaatattaaattcaacttaaagcaggttgaagcatacataaatgacaattcaattgagtttacaattgcttttcatgaagaaaccccattggtctttcattcttatatatcagatgaaaataatgtgcgattttactattctgcttctccatttcgaacagaagggatggatgcaaacttgattgcatctatgaataaaggacttcactggtttgatattgaaacgtttaaaaatcagggaaaaaaagaatatgattggggaggaatatctaatccggatgctccaaatggaatagataacttcaaaattggatttggaggaaaacaggtaacgtattttaatgttatttacttgcagggcttgctcgggggcttatattattttttaaaagggcggagaaaatagagatgtatattatacgtttagatgatgcgtctgagtatagagacttggataaatggaatcgagtagaagcacttttagatcaatatcatataaaaccagtggtaggggtaatcccggataataaagatcctgaattgttggaaaaatatccgtttgatttcactttttgggacaaagtgttagggtggcagaaaaaagggtggagtgtggcaatgcatggataccagcatcgctttatttccaagaacagtggaattaatccggttaatcattattctgaatttgcagggctcccattagacagacaaattcaaatgattaaaaaaagtatggaaatattcgggaatcatggagttgtgccacagcttttttttgctccggcccatacttttgacttaaatacattagaagctctaaagaggggaagccggattcgggttataagcgatacggtagccaataatatatatcttgaaaatgatttttattttgtccctcagcaagctggcagggtgcgggcattaccaatgaagttggttacattttgctatcatcctaataatatgaaccagtcagagttcgcaagattagaggaatttatacaaagtcacagaaataaatttggggattttagagcaatacaattaaaaaagagaaaaaggaatttatatgacaggcttttattcaagtcatattttatgtttagaaaattaagaacattgaggtaataagagtgaaagcgttaaagtggataattcagtatgatacattagacagtgatgaagagagaatatgcggactttcctctcttacactgtgcgattataagattagtttgttgacgaggcaagagtatcgtgtggatataatctccccttctattacgcaaaagaaatggaagttctttagcagaaaaaccaaaatattaaattcaaatgttcgattgatacttttttctacatttggtctgacagggaaatttggcctgtttgtatcaaagatggtttcaatggtgcaactttttatttatctactattgaatgttaaaaaaaacgaaataatagtagtttcccattccctgattttttgtatgccagtatacttggcaaaaaaaattagaagatttcaattattattagattttggcgaggaatataacaaggttaaaaaaggaaataagatataccaatattttgaacctaaattaattaaggcggcagataaatttatatttagtaataatttactaacaaaagcatatggagtagagcgtgataaggctgttgtaatatatggacaatatatccgtgcaagtgaaacgaatataaaagataagattgcggacaataggacacatgttgtttatgctgggattattagttcagatgaaggaagtgtctatagagcgattgaattagctaactatttggatgaaaatttttgtattcatattttaggagaagttcccaaacatgaggagaaaaaattttattctcttattgagagaagtcttggtgggtgtcaggtgatttatgaaggagttaaaaagggaaaagagtttttcgacacactatctcaatatcatataggtttaaatctaagagattcgaaggcagaatatatagattttgcttttccttcaaaatgtttgacgtatttaagtgcgggtatacatgtggtgtcaagcgatataaaatgtgtgagaaagtcaaaagtgggaaatcttattcacttttatacaaaaaattctttagaagatgtggcacagacaatcaaacaagttgatttaaatagcgagtataagccaaatgaacaattagtagctttggatcaggaggcagccgaaaaattagcacttttgcttagttagacgggagtaaactatgttgagcataaagaaaaaaacatttaaatattcaacactccacctcatcttaggatgttgcattgttttatggattaatggaggtttgattaattatttgtttgtacacataccagatgtttttaagatggttatttttttgatgtggatctgtattgcggttacatatgataaatgtttttttaatacatatctgttaaaaagtgtatcgttgtttgctttttgtggcgtattaattgcagctgtggtgatgacagatttaaatacaatttcttactatttaaaagtttgtgtatttctgttgatgattaatgccatatatatattttacagccgattttacacagaacatagccgggctatattatatgttgtagcaatagacagtacttatattatcattaatacattaattcatttaataaattcaccaaatctttctagatacttatctatgtcggaagataaaatcgtattatatttaggacgagcaagtacaagttttatcgccataggcaattatacatttgcatatggaattgtctttctaggattcttttttttatatcgtactttaacatcaaaaaaaaatcgaattttatttacattactttatttttttatgtatttagtattgataaaaatggaatttactatagcactgctgttatatgcattatcatcactgctgtatttttgtctgataggaataaaagaacgtaaaaagtttattttaattttgctgatgtttatggcggcaaatgtcatattcataattggtataccaatatttcttcaatcgattgcaaaatattttccagaagggatagccattcgtttaaatgagattggagatatgtttaataaagaattatcaaataaagcagatttaaagttaagattagtattatattatgattcactaaattccttcattcaaaacatattaggtggatgtttgttaaatcaagaagggagcattggaggccattcaactattttagattttttaggaagctttggattgctgacatttcctatatttatttattttggagaattttatctgacaactttaaagtatttcaaagggaatatccgaaaaatatatataacgggtattttttattttgtaaccttgagtattgttaatactacattttcacctagaatactattatatgcttttttagtattcccacttttattgcttcaggagagaaagtatgaagagagtatgtatcattcataacacaggaataatgggaggcggtacaaagagcttttttgatgtgattgggatgctgcaggaaaagtatgaggtgattgcttgtgtaccaaagggtgctaagacaattattgattatttagttaaaaagaatattcacatatatgaaatcgagagtaatataccgatttttccatactattcgggaggttcttcttttttttctccttcttttgtaaaggaaattctgttatggaaaaaggggccagattttgcagcagaaattgtcaaactaaagccagatttattgatttttaattctgtaatcatggcggtatcaggagcgtatttcccttctgatttaaaaaaagtatgtattattagggagacttttaaacaaacaatctgggacaaactttataaaaaatggttaaatgaaaatttttcaggagtatgttctatcgctgagtcagaattaacgtatcttaacttattgattcctacagtagttattcctgatttttatgaagttgaccagatgaaagatagtagcatagaattggcaaaaaagaaaaaagactttcaattgctgtatttaggtggacttgacttcattaaaggcccagatatagcaatagagagtcttaaatttttgccagacgactgccggctaatatgtgcgggacactttgatataggccaactaagtgcgaaaagtatattaaaaatatggactcatcctagactgttttggaatcggttaaaaataaaatattatttaaatcaaaatactatcagaagaaaaattgagtttgtgggtttttgtcaaaatgtttcatcactgtttcaggagacagatgttgtaatatttccttcgaatgttccacatcaactaagacccggtattgaagcaggaaacttttcgaaaccggttattttatctgatttcccagctactagggaatattttaaaaatggctataacgcgctaacgtttacaccacataacgcaaaaaaattagcagaatctatatataaattatatgaagatagcaatttacgtgaacagttaggaagaaataatcgtgaggcaacactaagactgcatcacaaaacatctattcaaaataaattgttaaattttcttgaggaggttacccatgtttgagggaaaaacattattaattacaggaggaacgggttcctttggaaatgcagtactgaatcggtttttaaacacagatatcaaggaaattagagtgttttcaagagacgaattgaaacaggacaatatgcgtcatttttatcagcagagttacccggaggtcagtgataaaattaaattttatattggtgatgttcgcgatcttcacagcatcaaaaatgcaatgcacggagtggattatatcttccatgcggctgctttaaaacaggttccttcctgtgaattctttccaatagaagcggtaagaacgaatgtactgggcactgaaaacattctgacggcagcaattgaagagggagtgaagaaggtgatctgtctttccacagataaggccgcctacccggtcaacgccatgggaaccagtaaggcgatgatggaaaaggtcattgtggcaaaatccagaactgtatcgccagagaagacgacgatctgttgtacacgttatggtaatgttctctgctccagaggttcagtcgttcccctgtttatcagtcagataaaggaggggaagccattgacggtaactgaagctgagatgacccgttttattatgagcctggaagaggctgttgaattagttgtgtttgcttttgagaatgcccagtctggagacattatggtgcagaaagcacccgcctgtacaattcgggtcttaacgcaggcggtgaaagaactttttaatgcggataatgaagtgaaggtaattgggattcgccatggagaaaaaatgtatgaaacccttcttacgaatgaggagtgtgcccatgcgatagacatgggacatttttatagagttccggcagacaagagagatctaaactatgataaatattttaaaactggtgacgccaagagaaacagactaacagagtttaactcaaataatacggaacttctctcggtggaacaggtgaaagataaattactatcactttcttacatcagagaagagattgccgagtgggaggaaagtaaagcgtgaaagtacttgtgaccggggctgacggttttatagggaaaaatttgtgcgcgcgtctggcttatgaagagaatattgaggtgctaccttttgataaggatatgaaagaaggaaagctggaagagtacagtaggatttgtgaatttgtgttacatctggctggggtaaacaggcctaaggatccaaaggaatttcaggaaggaaatttcggttttacatccaggcttttaagttatttaaaacagaatgaaaatgattgtccgatcatgctggcttcctccacccaggcagaacttaataatccctatggaaaaagcaaattggcgggagaaaaattgctccgtcaatatgggggggagacaggggcaaaaattttaatttatcggtttacaaatgtttttggcaaatggtgtcttccaaactataacagcgctgtagctacgttttgttacaatacggcgaatgatcttcccttaacggtgaatgggagagaaacgaaagtaaaactgatttatatcgatgatgtggtggatgaacttatatctgctctaaacggaagagaaaataaaaataatacaggtttctgccaggtacatcctgattatacagttactcttggagaaattgttgatttacttcaggaatttaagaactcaagagaatcgaaaattgttccggatatgacaaatgaaagttttagcaagaagctttacagtacatatctgagttatctcccggagcaggagtttaaatatcccctcaagatgaatatagatgagagaggctctttcacagagattttacggactgccgacagaggtcagttttctgtaaacatttcaaaaccaggaatagagaaggggaaccattggcataacacgaaaaatgaaaaatttgttgtggtcagcgggaaggccctgattcagtttcgaaggccggaatcaaaagaaattatcaattatcatgtttcaggagaaaaattagaaattgtggatattccagttggatatacgcacaacattattaatgaaggagatacggatctggtgacatttatgtggtgtaatgaatgtttcgatcctgaaagaccggatactttctttttgagagtaaatgatagtattgattactaatctaagaaagaggttaagaaaattgcaggagcatagaagaacgaatgaataaactaaggttaatgacaattataggaacccggccggagataatccggctgtcggaagtgataaaaaaatgtgatatttattttgagcagatactggtacatacggggcagaactgggattatacattaaaccaaatatttttcgaggatttggggcttcgacagccggatatttatctggatgcggtaggtgacgatttgggagaaactattggaaatatcattgcaaaaagttacaaggtgatgaaggaacaaatgccggatgcattattgatactgggcgatacaaattctgcgctgtcggctatttctgctaagcggctgaaaattccgatttttcatatggaggctgggaaccgctgtttcgatgaaaatctaccggaagagacgaacagaagaattgtggatcatatcgccgatgtgaatctgtgctacagtgagcatgcgagaagatacttgaatgcagaaggaaggccgaaggagcgtacctatgtaaccggctctccgatggcagaagtgttaagacggaactgggataagatccagaagagtcagatcctttcaacgctcggcttagaatcaggtaagtatattcttttatctgcccatcgggaagaaaatattgtcaatgagactaatttttttgatttaatgaatgcagtgaatgagatggcagaacagtatcaaatgccggttatttacagtacccatccgagaagcaagaagtttattgaagccagagaatttgaatttcatccgatggtaagaagtatgaaaccgtttggattttcggactataaccatttacagatgaatgcattctgcgttgtgtcggacagtgggacacttccggaggaatcagcatacttcaatgcaatgggcaggccgtttcctgcggtttgtataagaacctctacagaacggccggaagcgctcgataaagggaattttgtgttggggggatatccggacaacaggtgcttcaggcagtggagctggcggtgcggatgcaaaaaaactgtgattatgcggtgccggtatcagattatgtggatgagaatgtgagtgttaagattgtgaaattaattcagagctatacagggatagtggatcggatggtgtggagaaaggaatggatttaagagagaaaaaattatataaagacactgcaattttatttataggaaacatttcaacaaaattcatcagtttttttttagtgcctttatattcatactatttaataccagaagagtatggccgatttgatatctatttgacgcttctttcaatgttatacgttattgtttcattgcaagccgtggaatcttcatttcgcttcatacaagagtgtacaaatgaccaggaaagaaaagtaacggtatcaaatgctttattaatagcaattatagggtgtctcatatttggtatagtgatattattattggcttatgcaggaacttcatttaagtattataaagaattttatatatatacattgaccgcgatcctgtctaatcttttccttcaaacattacggggaatgaataaaactattaattacgtagtgataagtgctatatcagcattttcatccgccatatttaatatcttttttattgtatactgttctttagggggatattcacttttattaactcccattatagtaaatgtagaaatagttgtcctttgcttagtgtttgggaagttttatcgttttctgtcttttaaaaccatagtagtaggtgaaataaaaaagcaattggcgtatgctctgccgttaattcccaatgcattatgcgtttggttattaggttcgttaggtcgatttatattactgctttattatggagaaaaagaggtaggtttactggcatttaccctgaaatttcctcagcttttatctttggcttcttcaatatttattatggcatggcaggtaaatcttttacagtcatatgaagaagcagacagagatatattcgcaagtaaaatattttatcattatatgaaaagtattatttcattaatgatagtagcaatgccattgttaaaaataataatttacgttggcatgggaaaagattatttgtcaacttggagatacattccaatcttttttattggagtggtactttcttcattttctcaattttataatcttggtttttatggcgcaaaaaaaacaaaaaaagttttttatagttcaatatatgcaattgtaatatatgctttttctggaattttattagcaaaagatttttatatttatggtattggaatagcatacagtatttctgaactaatacgttggttatatattcgcaaaaatgtacgggagtatttaaatataaagattgcttggagaaaaactatagtagagctggtactttttattagcgtagtatgttcttattattgcttaacatggaaaatccaagtaataatttttttagtagcgacattgatcatacttatagccaatagaaacctcctaaaaaaactatttgtttctcaaaaggagaataaaaatgggtgaaaaaataaaaaatattaaaactatagaaattggaaataactttttagatgttgaactcaatgaggcaactttaaaagggggaaataggtggattcatttgcagaatgaagtacttagagtacaatttagtgaagatgattttataaaaatactgacgtgtatattaaaggctgaggaacgattaaagtataataagagagaagaaagagaaacatgaatatagataaaaataagataattaatatgtttttcgattttgaaaaagcaggtattacatatgcccttttgcgagatgtggataagatacttccggaattatattcaagtgataaagacattgatattattatacgtcctgaaagccgtaagcagtttatacaatatttacactctaacaaatggaaaagggtggaacacccattaggagaagtaaacaccatctttttatatgcgatgacaccttttgaattttatctaaaggacgggctcaggttagatatctgttatcagctatcttgtaaaagcacaaatgcaggagaatggatgccaattgatcgaagcattaatcaaatgatgtggacaagaattaaaaggaatgataattttggttggtatgaattatcaacagaagatgaattgatacacctattgacgagatgcatatttgataaaaaaaattttaacattgcatatcaaaatcgacttgaagagcttttagaaaaagtaaatatcgaaacgataaaaatcgagttgaataaagttttctttaagtttactgataatttattggatttgttgataaagaaaaagtataactgtattattaaaaattatttgacgtttaaagagtattaaacaaaaggggataaacatattatgagtaatccaggcgttatccaacttgcttccattgccctatctgacagaagacagtttcgcgtagaggataatataggagaagcaatacatcttcattacggagatgagtttcgggttgatgaaacttatcagaactttatggaattatctggttttgccggctccattttaaatgaaatgttagggcaaacaggatttgatataaagtattttgataagtcttttatagctgatatagctgataaattaacgaagattgaaaaagtagaatttaatacagttgagctgggtaaattaaaaatacagacaataaatatgtttaaattacctgttatccgatatttaaaatattcaagagtttataaagcgttgaaaggaaataaagaggagctgatagcttataaacaggaaaaccatagggggcaaagtaatgtagatagggtggattcgatgtataaattgttgcaacaagagaattatccatttgacaataaatatataattttatttaatgattccaatataatcaaagatggtcagcatcgagcagcctgtttattagaacttaaaggtgatatatcgattccagttatacgaattcaatttaaaaataagcaatatagaacatcggaacacccatggatagcttatctttttatttggaaaaaagaacggataaaaaaattcctgaaaaaaatcatatataaaagcagacaaaaaatcaaagttgtattgattaaaattaaatataaaacagggttatggaaataaaaggagaagataataatatgaacctatctgttgccggaaccggctacgtcggcctggtggctggcgtctgctttgcagaagttggccattgcgtcacttgcgttgacatagacgaggaaaaagtaaaattgatggaatcgggtatcagtccaatctatgagaaggatttagaagaactgatgcaaaagaattataaagcagggcgtttacattacactactgattataaatcagcttaccgtaatgcagacgctatttttattggagttggaacacctgaacaaccggatggttcggctaacttgtcctatattgccacagtggccagacagattgcggaaaatgtggagcaagactgtctggtagtagtaaagtccacagttcctgtcggtacgaatgataaagtcgaacaatttattaaagattttttagttcgtgatgtaaaagtagaagtggcctctaatccggagttccttgctcaaggaaccgcggttcacgatacgctgcatgcagctcggattatcatagggacggagagtaggggggcagaggagaagctcaagcaaatttacgaaccgttccgccttccgattgtatatgtcaagcggcggagcgcggagatgattaaatatgcctccaacgatttcttggcgttgaaaatttcatatatgaatgatattgctaatctttgcgaactggtgggagcagacattgaggatgtggccaaaggaatgtcatatgacgaacggattggtgcaagttttctgaatgcaggtattggctatgggggaagttgttttccgaaagatacgaaggcactggagtatttggccagacaaaaaggctatgaactgcgaacggtgaaagcagctattgatgtaaaccgtgatcagaaagttcggttgtttcggaaagccagtgatcgtctaattacttttgcaggactcaaagtggctgttctgggattgacatttaagccgggaacggatgaccttagggaagcgccatcattagaaaatattccacttcttctagaagccggagctgaagtttatgcttatgatcccgtaggagaggaaaatttcaaaaagaaaattgcagagaaaatcaattatgtgcatactccacaggaagcgctgaacggcgctggagtgtgctttatttttacagaatggaatgaaattaaagatgtaaaaccggcagagtataagaagttgatgaaaattccgctcgtctatgatggtaggaacatctatagtttggaggcaatgcagacggcaggagtggaatattattcgattggcagatgatggggcatagtgtaaggagttaatataaaaaatatgaatcttaacataggaaggaggatttagatgtggagtatatcaatagaggtttgaaaaaaattctgattacaggtggggcgggatttataggatttcacctgagccgttttctactggaacagggatatcaggtgatttcaattgataatttaaatcattattatgaagtgagcttaaaagaggatcgtttgagccggctaatctgctatccaaacttccaatttaaaaaaatggatttggtggatagtcaagcattgcagaacctatttaaaaaagtaaagccagatattgtggtcaatttagcagcccaggctggcgttcgttatagtattgagaaaccagagacttatattcagtcaaacctgattggattttttaatattctggaatgttgtcgttattatccggttaaacatttggtgtttgcctcctccagttctgtctatggcgcgaataaaaaggtgccatattctacagaggataaaacagatcagccagtgagcctatatgctgcaactaagaagtccaatgagcttatggcatattcatatagcaaactatatggcatctcagcaactggcctaaggttttttacggtatatggtccctttggacgaccggatatggcatacttttcttttactaaaaaaatcttgaacaaagaaccaatccagatatttaattatggagacatgtatcgtgattttacatatatagatgatatcgtaaaaggaattgaatcaatgattttttatcctccgatagaagacgaaaacggtgtaaaatttaaggtttataatattggaaacaatcatccggaaaagttaatggatttagtcacaatattggaaaaatgtcttggaaagaaagcagtaatagaatttttacctatgcagcagggggatgtatatcaaacatatgcggatgtggatacacttattaaagacttcgggtttaagccggatacttcgttagaagaagggattgaacaatttgtaaagtggtatacagaatatcataaatattaagactaagaacatttccataaagtaaccttccatctcaccataaaataaacctccaaactgagtaaggtattcttacctcagtttgaaggttcactatctttgagataatctacgtcatgtcggcataagtttcccaaacgatacagaacagcattttttacaggtactcaatccagtcatgataaaaagctcccagtgcagccccccttacagcaccctatccaacccctcaacccgatactccacaccattttccttcgcctctgccgcagtcagcagcagcgcatacttttccttcgtcagcaaataagcaatagctgctattgttgaagccgattgcactgagcacaatgccagttatccactcagataacaggcagtatagcatattattccgccgatcatcatctgcttcttgccgaatttgtttacaaacacaccggccaaaacggttgtaagcaacaggaaaagcgttgtgattagtaacatcaactttgctgaatatgccatgcagttgtgcagacttgtcataataaaatcggtctgctgtattctgtcaatttcatgttgaactgtgaaaagggagataaactgcatctgctggcgtatgaagcggtgaaggaaaagcgaaacttgagcatatcgtgaactatcggaaaaagtacgccaaagtgataaagcttacagctgcctaatataccgtagttaatgaaaaatacagtaacagatacaaaaaaactgccgttaacagttcacctgtcccggcagtttttttcctatacctaaattcaattatcactctaattactttttcccactcttatctttcttaaaccgtgcaaagaatcccttcttcttaggaagcggcggtatgccaccgcggacgctcttaacatccgttatgtagagcccgctgattacaaccttggcttctgtcttaaccgggagctgtaaaaacgccttgtcatctgcaataagagttaaaaccttcgggccgacctttgccttcacaataggaagcttggcccttctcatataccatggagtctgatcaataaccatcttagggagacccgactctttgactttcagtttcttcttatcaataacgagaattgaaaccgtctgttttgcagcttccatcatggactgctgctcagcctgacgcttctccatcttccttccgaaataataaagtactgccagtgcaatgagtgcaataaccaggatgatgagcactacgttcagaaatgtctgcatataaatacctccgtaaatgatagcggcggatatggcgttaactataaaaatgacaggaaaacagcccctttcccttgcaatttaccactgtccatcagcaccacaaaaaaataaccgcacttgtcgctattatagcatcagatagataaaaaggcaaggaaaagcgtaaaaaccgggggccggaaaagaacagaatgtaacagttcatgctgtctgaactgttacaacggaatgtcatgttcacacggaataaagagggcatcccgcaggccgtaaattccatcgggcgccctctccatccttgtcttgtacgtatgaagtcagcagtatgagtgtgtatcttaaaggttgatagctcctgtttcttcttcgatgagctgaatcagggtaccatccttgacaagcgtgtaaatatattcaatatcgggataaaagaaacggtcctggtcggcaaaagctactttttcccggatgaaatcatggagctttgccgtcgcttttccctgcctcaatggctttaacatatcgattgcctgaagggagaccatgatgtcgattgcaataatatactgcagctttctcattgcttccccggcgcgcttcgatgcgttgtaagccatggaaacaggatcctcctgtccggcgcaggttggtattgaatcaatggaggcaggcacggcaagcagcttgatttcattctgaagaccggctgccgtatactgcgggatcataaagccgttattcagccccgggttcgcgacgaggaaggcggggaggccgtcgtttaaattgcggttaaccatgcggtcaatgcttctttccgcctggtttccggcaatagccgcggccatgctgatcatatcggcatgggtaccgacaaaggaaccgtcgaagtttccgcacatcagagcttcacctctgccgtcttcagtctcgaaaatttccggattatcactgacggagtgcatttcattgataattacctcataagcctccttgacgagtctgaaagcggcgccgtggatatgaggcatccctctcatcacataggcgtcctggaccttgctgtctctgtaagcctcactgatttcgcttccctccagaagccggagaagattatcggcggacgctctctgttcctcatgctgcttattattgtgaatccttgaatccaaggccttagttgtcccgcgcagcgcctcaaagcagagggctccggctatttcaaggtttttcattgagataatggaatcataggaggccagcagcgccagagcagtgacggtgattgtgccgttcagcatggacaggccctccttacattccagttctgccggtgacagacctttttcagccatggcatcaagcgacggtatttttttcccatttttcagtacatgcccctctccgatataagccatgacaagatgggcctccactccgaggtaaccgacggaaccttctcccggggcaaatggaaccagattattattaagaaaatcgcgtattaactcaagcgtttccaggcggataccggaatggccgtggcccagattgataatcgtcatgaacatgactgccctggcctgttcttctgtgagcggagtaccgactgcgcaggaatgggagcggacaatatttttctgaagcgttttcgcatcttcctgtttaatggtataacggacattttcaccgaatccggttgttacgccgtaaataatccggccttcatccagaaaacgctcaatcagccggcggttggcccttactttttcacagaactcctctgagaaagtaacttttgcatggaaccgcacaacggccataaagtcgtccaatccgatatttttacagttattcagaactaattcctgtaatacagcgggatttttcaattgaattttcataacatttactccttttcagataaatataatttttataatcagacagcctgaactgttactaacagataacatatgcggcagctttttaggccgtcaggccgccggtttataagtgaataatgaaactactgcgaaaatgatgacagaaaagaggcagctcataatatcggacggaattccgaaaatagaaaagccgttcatgcccagaaccacaaataacaatcctcctgccagaccggcaaatgctccctcctttgtggcctttttccagagcaggccgcctacaaccggtgcaaatacgcctgccgtataaatggtataggaaagcagcagcacattcagtatattcggcatcatcagagccacgaatacagagatcaggccgataatcagagtccagatacgtgacaattttaacagctttgcatcatcggccgttccgtctttcaggataaaccgcagatagacatctcctatgacatgggaggttgcggcagtcagaatggaatcggctgtcgataatatggcggctattacagctgccaatgtgataccgcccagtaccggaggcagtatggcggagataatctgaggaaccaccagggacggattcgccagctccgggaagattgccttaccggcaatgccgagaataaccgggaaaaaggttaggatgccaacgatcacacaagcgagaattccggccttttttgccgtcttcgtatctttggcggcgaaaagtctctggtagacatcctgaccgatgagtgtgtaaataaacattggaagtatcaggtacagaatataggagggttccaccccctgggtcatggtaaaataatttgcggaagtctgcgagttcaccgcctcgaccataccgctccagcccccagcttgtttacggtaaaaaatgtagcggcgataatacctgcaccggcaacgataatctgaataaaatcagtgatggtaacagcccacaaccctccgaccacggtataaccgataaaaaaagcagcggcgattagaccgcccacaaccggacttccgattccgatggaagacagaatactcccggcggaattcacctgtccggacaggatgccaatcagggccagaagcgacagcattgcacacagaaagcgcagcagcgggctgccgtatcttgtctccaggagttctgctaccgtatagagctgcattccctccatctttttaagaaccaggcatacggccaggataccgacagcgcctgccagcccgttataccacgcgatcattcctgatgaatatgcctcagccccagaccgaccacataacctccgccgaaataagtcgcagccagagtgaaggctgccaggaatacacccagccgcctcccggccagcaaaaagtcttcggcagacgagttgaatttgtttgcccacacacttacaccgaacataatcaccagatacgaaattagaattaccgttaacatgaaatactcctcctttgtacttgatatctgtttaataagcaagaggtatgccaaaattaatgggatataaaaaaatgggcttaaaactttgcaattattcggaaaatagataaaaacaggaaaaacaaagacggagtacaaagataataagtaagaaggcatcagtttagacggcatgaacagttaaatttagaagttatgcttcgctgcgttatgcaaagaatttttgcatatgcaatattattatgcatagagaagtggacataatgatgcaatcatgttaagtttagaacaggatgaaattagtaacggttcatacgcggttactgttcacacggtgtgttccgcgacgcacactggctgcgctgaccgtacgagcataaagtttaaaaagaggtgtgacatggcagaattatatgaaataagtttatatcttgattccgattaccgtcttgtaaaaatcaattggaagaatgatattttggagagccggcttaagccgttctggaacgaatacatcggccggcccatggaggagctttcagattttcgctgggacaaggaggaaggcattcttgcctggcacaatgaaattttccggtgccaggaagagaagctggaaagagacaacagtctgatccttttaaaaaagggaatcagcagagaacagatttatgaaaaagtactcgatacgctcgatgagagtatccagatttatgatgaacacggcaatatcatttattttaacagcgtgtgcaatgagattgtcggcagcgatgagcctgtggtggggaaacatcttctcgatgtatttgatgtcgaggccgacgacagcacaaccctggaggcgctgcgcatggaggcaccggtcagataccggtttagacattattactccagaaaagggaaggagctgtttacggtcaattctgcttttcctgtgaaaatgaatgggcgtactgtggcggttcttgccctggaggaaaatatttctgtcatttaccgcaaggcggagcagcttgagaaacttcaaagtgcgataaaagagaaggtatccgtatcttccgattaccgcagaaatacggggtacacgttggatgatatgatagggcatcatccaggcatcaaaaagctgagggaattggcccggaaagtggcttttcagaacaataatgtgctgatcgtaggggagacagggacgggaaaagaaatagttgcccagagtattcacaggatgagcgcgaggaaaaacgctccttttgtggctctaaactgcgcagctataccggaggggctgatcgaaagtatcctgtttggaactgcaaaaggctcgtttaccggaagttcggacaagacagggcttttggaggaagccgacaagggacgctctttctggatgagttaaattccatgagtttcagtatgcaggccaaagtactgagagcgcttcaggagggtacattcaggcgtgtggggggaagtaaagagtacaggacagatgtaagagtaatttccacctgtaatgaaaatccgtttcagctcatggagcagcagaagctgcgttccgatttattttacaggctggcaacaattattctggagattccttccctgcgcgaacggccggaggatatcgaagaattaatccgccatcatataacacaaatacggggagactacgctttcccatttgatgagatagaaccgtccgtactctggcagcttcagcagtattcctggccggggaatgtcagagaattgtttcatgccgtggattatgcaatgaacgtggcagccgaccgtgttttcaggcttgaatatcttcctgcctactgtttcaggggaagggagaggaacgtggaagccgggaaagcatcggcagcaggatttatatcggcagcaaagagcgcgggagagccagaccgtaagattgggcgggagaaagatttagagagaaccttacaggaacagatggaggatattgagtctgaaatcatcagggaaacactccgccgctgctgcggtaatgtgacgcaggcagccaaaaaacttgggctgcagcgccagagcctccagtataggataaggaaatatgggatttatatttaaaacaggttatcgttatcggcggtgattggtatttggtgagagttggggttgaaaataaattatcaaaaatgataaaaaatgaaaaatattttacatttctattgactttcacaatggagatttctataatgaagctatggaggttttacatggataataacgtacttagcatcatcaatgaaaattattcggcattgacaaagacgcagaaaaaactggcggattttatcaaagataatgtgcatatgatcccatttctatcgattgcggagcttggggaaaagacgcaggtgagtctggccagtattacccgctttacgagggagctggggtttaacggttattcacaattccagaaaagcgcagcggatttgattcgcaaggacgtggtaccgatgcgtgaattaaagcattcgattacagaggaggggaggaagacatattaagccggatgatacgtctgaatattaactcactggagacactgaacagtgaagacctgaaaagaaattttcagcaatccgttgatttgataacgggctgccgtaaactctatataactgccgcccgctcgtctttcagtgttgcatattatctgtatttcatgctgaaggaatttatggagcatgttgaactgctgacagaaggaaccggagatatttcgaataaactgcagtacattgagaaagaagactgtctcattgcaatcagctatgaacgatataccagggctacatataatattgtctcctatttaaataaaaaaggatgcccggtcatagcggttacggacagccattcttcaccaattgcattgaaggccacaacggttcttctggcaaagcatgcggtggatacctattcttttgtcaactcaatgacggtggcaaacgccctgattactgcggcaggaaggagggataaagacaatacattgaagaagctggagcgccaggatgagatagcgcttgaatacggcttatatttgtaatgaatcagatataacatttttcagaatagattctaaacaaaaaggaaggaacttttaaagcgctgcatgttggcccattcagacattctttaaggagctcccccttcctttagtatacgctaaaatcctgcagattgcaagaagccgggcggtactgtcttagaatttcttagtgataatcgttactgttcacaccccgccaggaagcggagtgcgaacagtaactgataataatccctgaaaaagttataaataaaactgaatatgaaccagctttaccacggtaatactgtggaaaaagagttactattcacggcccattccgcgaggtgttttcgtgcgtattttgcacgaaaatcccgagtttcacggcgcgaaactgcattttttgcagtttctgtgcatcgcggagcgtgttacggttcacggaactgcgtttttcagcagggccgtgaatagtaacgaaaaagaggtggggtagtgaaaggagatgttgtaatgattttgggtttaccgcccatcttgggctttttgcctcttgttctctacattatcttaatgatgaagggaaaagacatgaacctgtccgtcctgatttgcgtgattttaggcgctgtcatgacgggagagagtgtaagcggttttggtaccgttctacagaattctctcagttctttcttgtcgctgatcggctttatcatcgttcttggctccggtctgggagaagtcctgaccaggacgaaagtcgctcataacattgtgcatctggtaataggaaaagcaaagcttaaatcaaagaaacaggcaatttttattgccatgtgcacatcgaccctgctggtctccatgcttggaacactgtcgggttcgaatgcaattattgcgccgattctgattccgattatggccagtcttgggattacgcccagcacactgggggtaatcctgcatggcgcgggggcggccgggcttcagattggtccgtttgtgcctcctgtagcaaccgtcatgggactgaccgggctgaattacagccagtatatgaaaacggcaggactgccgttaggtcttatcatatgggtatgtacattttttgttgcctgccggacacagaagcttacggaaggaaaggtgtcttacagcggggacgaagcagtttcggaagatttccaggtgacgccggagatcaaacgggctacctgggcattcggaatcacgatgcttgtcatgctggtttacggagtagcggttaaggccggggcatcttatgcaattgtggtaatgctgacggcttccctggtcacggcgtttgcatcggggatgggaattgcagaggggctgacaaccctcgtgcagggagcttctaaaatgttttggatgttctttatgtttatcctgttcgacccgtttctcaactatgtggcggtatcgggagcatttgatgcgatcgccggatatatgcagcctctcatcgacgcgggaggcgtggtggcattccttatgctcagcaccgcaatcggtgtatttggaatatcgggagcaggcgttgcgcaggcaaaaatgatccacgatctgtttttacccctggtagtacttctgtccgttaaaatggatatctgggctttggtgattcttgtgggatgccagatcacattctttgtcacgccgactgtggatatggtcggcaatatggggctggccaggtcaaaggatatcaaggcaatgttgaaaaacggctgggttatcactattgttacttttgtctatgtgctgattcgggctgtaatgtacgcggggtaaatcccgtcaaaagacacacggagaactctttggggagcggagcggactccgtaataaaccggacggccatatgcagagaagaatagataacagttcagacgtctgaaccgttacaagaatagaaaggaaaaggtaaaatatatgggaattcatttagcattgcttcaaacagacattaaattttgtgatttcgaatataacgccgcgcatgtcaaagaaatgatcgctgatgcgatggagaaagtgccgaggcccgatgtaatcgtgctgccggaagactggtcctccggtttttcagatgagatgttccaccatatggaagagcatattgaacagatagacggaccgtcggttaccgttttgagagaatgtgccaaacagtattcggtgtggatcgtcgccggttccgtgggtatccgatcagaagacgggatgagaaatactacgtttctcattaaccgggaaggggagatagtcggtgattacagcaaaatgcatctgtacagtgatatggatgaggatgtgccatatcttcacggaacaaaaacggaggtttacgatacggagctgggccgtgtcggattcatgatttgctatgatatccgtttctgcgaattatcacgcatttacgcgctaaggggagcggagctgctcatcgtcacttcgaattttccaaatccccgcgtaagtcactggaggacgctgctgattgccagggcgatcgaaaaccagatgtttgttgcagcctgcaaccgtgtaggggaaagtcccatgggaacttactgcggccattccatcatcatcgatccatgggggaatgttatcgctgagggaaacgatgaggaaggaatcataacaggttccatcgagctctcggaagtaaaggagataagggatatgattcatatgttccgggaccgcagaccggaaagctacggtgagcttgccgccggaaagaggtgatacgggggtggatacggataagcttaagttgaatgttttaaatctctgttcaaggatagaggggaaaaaggcgatcgtaatcgaggatttaaagacaggccaggcagtagaaatcaaccgtgatgaggtgtttcccgccgcaagcctgatcaaggttccggttttgtcagcgctttttcgaatggcaaaagaaaatcagattgccctggatgagagaatagagctggaaaaagacagccgcataggcggatttggaatcctcaaagatttgggagacgggcttaatcctgctgtgcgcgatttggcggttctgatgatcacgctcagcgacaacatagccgccaacctattaatcgatagaatcgggatgtctcagatcaattctgaacttcaggccatgggaatgaagcatacggtcctgcagcggaaaatgatggattcacaggcaaaggagagagggcttgacaattatacaagtgccggagacatgcagaagcttatgaaggcaatcttagaaagcagcttcaggggagatattctcgatatccttttccggcagcagtgcaataataagctgcccgccctgatggagggaggcgtgcgattcgcgcataagacgggggatttgccgggggtcgaacacgatgccggaattatatgcaccgatgacagggagataatagcaattgtacttaccgatgagcttgccgataaccgggaaggaatctggctgaaccaggagattggaaaattaataaacagtgaattaatcagagaaatgcagtaaaggtttagagcctgtttgaaaattcattcccatcatctgcacgccccacttcgcggcatatttggcccgaattcgcttaccgtagcccactacgccgcgctcattcgggccaaatcgcccacaaagtgtgacgcacagctgacagaaagcaattttcaaacacgctctagaaaagcaaaaaatccagaaaacaatttaaggagtaaataatgaacagaggaattataaaaaatgtggaggtaaaggtactggaactgcctttaaaaaaacagtggaaaatatctctgtatgagcagacaacaagagcccatgccgtcgtcaggattacaacggaggatggaattgttgggtttggcgaggctgctccgtctccggcatttatgggagaaacgggatatatgatggaggtcgccgtcaaccggtatctgaaagacgccgtgattggcatggacgtattttccacggatttaatacacgaaaaaatgaactctgccatttacggcaactatgcggcaaagtcggcgatagacatggcattatacgacatcatgggaaagataacggaacttcccgcataccggctcttgggaggactgtacagggaaaaagccgccctgagctgggtagtcgggatgcaggatttggatgcctcgattgaggaggcgagggaaaagctgaaggagggctaccgtgtattaaaggtgaaggttggaaaatcaccggaagtggattatcgtctggtaaagcgcatccgcgatgagctgggagacggtttcccgctgcgcctggatgcgaatcagggatataattacagtacagcgctcggtatcttccgaagactggaagaattcggcctggaaagcatagagcagccggtcaaacggtgggatatccagggcatgagaatgctgcgtgaacgtctgaaaaccccgattatggcagatgagtcggtctctgatttccattcggcaggcgtggtaatccgtgaacaggcctgcgacagcgtaaatatcaaagtaggcaaggtgggaggactgacgatggcaaagaagattgcggcgtgtctggaagcagaaggtcttttggcgacggccggaagtaatctggaggtgggaatcggctccgccgccagtatacattttgtggcaagtacggtaaacgcagatattcccaatgatatgctgctgggagggccgctgcatcagcatgatattattatagaagattttaaggtaaaggacggttatgtggaagtcccccagaagccaggcctgggaattgaagtagatgagagcatctttaagtaatccgaagatcagggaaaccttgcgggaactattgccgaaggtcagaaaactgcggcgtgagattcatgcaaatccggaacagggctacggggagacggctactacctcccggattaaacagtttctggaagaatatggggttccattctgtaattttgggcatatgactggcggatatgcatggatcgattgcggaaaggaacatacggccggattccgtgcggatatcgatgccctgccgattgaagaaaaaaatgaaatagactttaaatctgtcaatccgggcgtcatgcatgcatgcggccatgacatgcacgcgtctgtggcggcggggcttgccgtgattttatggaagttcaggcagctgctcagggtaaatattctgattgtcttccagccggcggaggaatgcaacccgacgggggagcaaaagccgttatcggccaggggctgtttgagcagtttggcgtggaggaattttatggattacatatgtggccggagcttaaagtcggagaaatcgcagtaaagccgggaccgatcatggcgtcgtcggataagctgctgatccgggtgacaggcaagaaagcccatgcggccgaaccacagaaaggggtggatgccatatccattgcggcggagattattaatgcggtggaacataaaataaggagggaaatcagcccttttgagaccgtactgatatcgatcggctccatccggacctcaggccggtacaacatcatatgtgatcaggttctgatagaaggaacgataaggagcatgaatcctgatatccgtcaatttgtccataaaagaataaaggaactggccggaaatatcgcggccgcatacaggggaacaaccggcgttactatcgaagacggttatgcggtggtagataacaaccgaagaattacggaaaaatttataaatgcggccggccggattctgggcgctgagtcggtccatacggatatatccccgagtctgattggggaggacttctcattttacagccaaaaactgccgtcgatgtattttttcatgggctgtgaaagtgaatatcccctgcataacgaaaaattcctcccaaaggaaagcacattggatgaagccattacattgatggcgggctatttcacagaatttgtgtaagactagagcgtgtcttaaaattcattcggagcggaattaaatccggtgatattcatccggctttaattccgctcagtttcctatagacatcaaatctatcaaatcatgtatcaaatttccaacaaatatactcaaacagcttcatcagattccattgggacggaggagaagatatagtctgcggatgcctttggaatccatcgctgtttagcggggttattaaaaaacggcataaatataggaaaacagggcaaaaatttccttgacacacaaatttattcatgataagatgaaaaatgcactattgtggtaacataggcccataaggccgaagtatgcccaaaattaaaccatagaaagaaaacaggggtgaaacgtcgaatggagaaaagcaggatgcgtccggtgaaagccggtaaaggtgtaagaatgaccttctcaagacaaaaagaagttctggaaatgccgaacttgattgagattcagaaaaactcttatcagtggttcctcgatgagggacttcgtgaagtgtttgctgacatctccccgattgcagattttgcagggcacttgagtttggactttgtagattttacactgtgtaaagatgacatcaaatatacgatcgaagagtgtaaggaacgtgatgctacttatgccgctcctttaaaagtaaaggttagactttgcaataaggataaagacgagattaatgaacatgagattttcatgggcgatctgccgcttatgactgacaccggttcctttgtaattaatggcgctgagcgtgtaatcgtcagccagttagtacgttcccctggtatctattacggaatagcacatgacaagattggtacggagttgtacagctgtacggttatcccgaaccgcggagcctggctggagtacgagacggattccaacgacatcttctatgtccgcgtggacagaacaagaaaagttcccgtaaccgtactgatccgtgcattaggttatggcaccaatgcagagattatcgaacttttcggtgaagagctgaagctggagaagagctttgagaaagatccttccagcaattaccaggatggccttctggaattatataagaagattcgtccgggtgagcctctttccgttgacagtgcagagagcttattaaacagcatgttcttcgaccccagaagatatgatcttgcaaaggtaggccgttataaatttaataagaaacttcattttaaaaaccgtatcgcgggacatacgctggctgaggatgtcgttgacatgtcaaccggtgaaattcttgcggaaaaaggtacggaggttgataaacagcttgcaaccgatatccagaacgcagccatcccatacgtatggattcagggtgagagaaagaaccataaggttctgtccaacatgatggtagatcttgcttcctatgtggatttcgatccggaggaagtcggtgttacagagttagtatactacccggtgcttgaaggtattctggcagaagctggatcagatgaagaattaaaggaagtcatcaagagagatatccatgatctgattccaaaacatattacgaaggaagatattatcgcttccatcaactacaatatgcatcttgagggcggaatcggaacacaggatgatatcgaccatctgggcaacagacgtatccgcgccgtcggagagcttttacagaaccagtaccgtatcggtctgtccaggatggagcgtgtggttcgtgagagaatgactactcaggatatggaaggtgtatctgcccagtccttaatcaatatcaagcctgtgacggcagccgttaaggagttcttcggaagctcccagctgtcccagtttatggatcagaataaccctctggcagagctgacgcataagagacgtctttccgcccttggacctggcggtctttccagagaccgtgccggattcgaggtacgagatgttcactatacacattacggccgtatgtgcccgatcgagactcccgagggtccgaacatcggtcttatcaactcccttgcaacctatgcaagagtaaaccagtacggctttgtggaagcgccgtaccgcgtggtagataaatccgacccgcacaacccggtcgttacggaagaggttgtatatctgacggctgatgaagaggataacttcgttgtagcacaggcgaatgagccgttggacgatgaaggccacttcattcacaataatgtttccggacgtttccgcgaagagacatctgagttccagaagaagagaatcgatctgatggacgtttctcctaagatggtgttctctgtagctacgtccatgattcctttcctggagaacgacgatgccaaccgtgcgctgatgggttccaacatgcagcgtcaggccgttccgcttctgaagacagaggcagcagtcgttggtacgggtatcgaaggaaaagcggcggttgactccggtgtctgcatggttgcaaagaatgcaggcgtagttgagcgctccgcatccaacgagatcattatcaaaagagattccgatggaaacagagatgtttaccatcttaccaaatttaagagaagcaaccagagcaactgctataaccagaaaccgattgtctacaaaggcgatcacgtggaggttggagaagttatcgcagacggtccgtccacggataacggtgagatcgccctgggtaagaacccgttaatcggattcatgacctgggaaggttataactacgaggatgccgttcttctgagcgagagactggtgcaggaagatgtatatacttccgttcatattgaagaatatgaagcagaagcgcgtgatacgaagctgggaccggaagagattacaagagatgttccgggtgtcggtgaagatgcgctgaaggatctggatgagagaggtattatccgaatcggagccgaggtacgtgccggagatattctggtgggcaaggttactcctaagggagagacagagctgaccgcagaggagagactgctgcgcgccatcttcggtgagaaggcgagagaggtacgtgatacttccttaaaggttccgcacggagcttacggtatcatcgtggatgcaaaagtattcacaagagagaacggcgacgagctttcaccgggcgtgaatgagacggtccgcatttacatcgcacagaaacgtaagatttccgtaggtgacaagatggccggccgtcacggcaacaagggtgttgtttcccgcgtgcttcctgtagaggatatgccgtttttaccaaacggacgtccgttagatattgtactcaaccctctgggcgtgccttcccgtatgaatatcggacaggttctggaaatccatttaagccttgctgcaagagcgcttggattcaatgtttccacaacgattttcgacggagcaaacgagattgatattcaggataccctggaactggcaaacgattatgtcaacacctcctgggaagaatttgaagaaaaatatagagataaagcagatccgaagctgatggaatatctgggaagccatctggagcacagagcgctctggaaaggcgtaccgcttggacgcgacggtaaagtccgcctgcgcgacggccgtaccggagaatattttgacagccctgtaaccatcggacacatgcactacctgaagctccatcatctggtagatgataagatccatgcgcgttccacaggaccatactcccttgttacacagcagcctctgggtggtaaagctcagttcggcggccagcgtttcggcgagatggaggtttgggcactcgaggcgtacggcgcatcttatacacttcaggaaatcctgacagtgaaatccgatgatgttgtaggacgtgtgaagacttacgaggccattatcaagggagagaatatccctgagccgggtattccggagtcctttaaggtacttcttaaagagcttcagtctcttggtcttgatgtcagagtcctgaaggaggacggttccgaggtggaactggctgaaacaatcgactatggcgacacagatatccgctcgatccttgaaagcgacagcaaacattactcccagaacgagtcctttggaagcttaggctaccaggaacaggaattcaaggacggagaattagcaactgtagaagagacagatgacagcgacgactttgcagatattcaggatgatttagaggaaattcaggacgacgattattctgacgatgaagattaatgatagaagggagtactgttcatgccagagacaaacgaaacttatcagccattgacatttgacgcaatcaagattggtttggcctcccctgagaagatccttgagtggtcccacggcgaggtgaaaaagccggagaccatcaactacagaaccttaaagccggagaaagacggtctgttctgtgagaagatcttcgggccgagcaaggattgggagtgccattgtggtaaatataaaaaaatcagatataaaggtgtaatctgtgaccgatgcggcgtagaagtaacgaaagccagtgtccgcagggagcgcgtgggccatattgccctcgcggcgcctgtttcccatatctggtacttcaagggaatccccagccgtatgggactgattctcgatatatctccgagaacactggaaaaggttctgtactttgcttcttatatcgtactggatccgggcaaaacaagcctccagtacaaacaggtattatccgagaaggagtaccgcgatgagctggagaaatacggctacggcaacttccgtgtaggaatgggagccgaggccattcaggaacttttacaggccattaatttggaaaaggattctgaggatttgagaaaacagctcaaagatgccacaggccagaagcgcgcccgtatcatcaagaggctggaagtggtcgaggccttcagaaattccggcaacaaaccggagtggatgattatgaccgtagttccggtaattcctccggatatccgtcctatggtacagctggacggcggccgttttgcaacatctgacttaaacgacttatatagaagaattatcaaccgtaacaaccgtcttgcccgtcttctggaactgggcgctcccgacatcattgtcaggaacgagaaacgtatgctccaggaggctgtcgacgcactcatcgacaacggcagacgaggcaggcctgtgacaggacctggaaacagagctttaaaatccctctccgatatgttaaagggtaaacagggccgtttccgccagaaccttctgggtaaacgagttgactattcgggacgttccgttatcgtagttggaccggaactgaagatttaccagtgcggccttccgaaggagatggcgattgagctgttcaagccttttgttatgaaagagcttgtctccaacggaaccgcacacaatatcaagaacgcgaagaagatggtagagcgtctccagccggaagtttgggatgtgctggaggatgttattaaagagcatccggttatgttaaaccgcgcgcctactctgcacagacttggtatccaggcctttgagccgattctggtagaaggtaaggcaatcaagcttcatccccttgtttgtactgcgttcaacgccgactttgacggtgaccagatggctgttcatctgccgctgtccgtagaggcccaggcagagtgccgtttccttttactgtctccgaacaacctgttaaaaccgtccgacggcggtcctgtagccgttccttcacaggatatggtactcggtatctactatctgacacaggagagaccgggagcaaagggcgaaggcatggccttcaagagtgttaacgaggcaattctcgcttatgagaacggcgaagttacccttcactcaaaagtaaaggtgagagtgcagaagagaatgcctgacggtacggttaagactggcatcatcgagtccaccgtaggccgcttcattttcaatgagattattccgcaggatctcggttttgtggacagaagcattgaagagaatgaattaaagctggaagtagacttccacgtaggcaagaagcagttaaaacagatccttgagaaagttatcaatattcacggcgcaacacagactgccgtgacacttgacgatattaaggcaattggttacaaatactccacaagggcggccatgaccgtatcaatttccgatatgaccgtgcctgagagcaaaaagcagctgattgaagatgcccagtctaccgttgaccagattgccaagaacttccgccgtggtctcatcacagaggaggagcgttacaaagaggttatcgagacatggaaggctaccgatgatcagctgactcatgacctgttaaccggacttgacaagtataataacatctatatgatggctgactccggagcccgtggttccgataaacagattaaacagctggcaggtatgcgtggacttatggcagatacaacaggccataccatcgaacttcctatcaagtccaacttccgtgaaggccttgacgtactggagtacttcatctctgcccacggagcgcgtaaaggtctgtctgatacggcgcttcgtacggccgactcaggttacctgacaagacgtcttgttgacgtttcccaggacctgatcgtacgtgaagaggactgctgtgaaggaagagaaatcccattcatggagattaaaggcttcatggacggccaggagacaatcgaggccctggaagagcgaatcacaggccgttttatcgccgagacgatcacagatcctgatacaggggaagtcattgtcaaggcaaaccatatgtgtacgccgaagcgtgcggctgccgttatggcagtgcttaggaaacagggcagggacagcgtgaaaatccgtaccgtcttaacctgtaaatcccatatcggtgtgtgtgcgaagtgctacggcgccaacatggcgaccggccagccggttcaggttggcgaggcggttggtattatcgctgcccagtccatcggtgagcctggtacacagcttacaatgcgtacgttccatacgggcggcgttgccggcggcgatatcacacagggtcttccccgtgtcgaggagcttttcgaggcgcgtaagccgaagggactcgcaattattgcagagttcggcggaattgcgacgatcaaggatacaaagaagaaacgtgagattattatcacggacaatgagactggtaattccaagacttacctgattccttacggttccagaatcaagattcaggacggttccttacttgaggccggtgacgagctgaccgaaggtagcgtgaatccgcatgacattctgaagattaagggtgtccgcgccgttcaggactacatgattcaggaggttcagcgcgtttaccgtcttcagggtgtagaaatcaacgataagcatatcgagatgattgtgcgccagatgctgaagaagattaagatagaggagagcggagattccgatgtgcttccgggaacctccatggacgttctggattacaacgatatgaacgaggctctgcttgcagaaggcaaagaaccggcaatcggccgtcaggttatgctcggtatcacaaaagcttctctggctacagattccttcttatcggccgcttccttccaggagacgacaaaagttcttacagaggccgctatcaacggtaaagtggatcatctgattggactgaaggagaacgttattatcggtaaactgattccggccggtactggtatgaagagataccgttccatcaagctgaataccgatatggaagaagaggatgagattatgctggctgacgacgatgatatcgatctggatattcttgacgaggcagacagaattgtcctgaatgaagatgaattaagcgaagagtaaaataagaggcaggctcggatggaaaatccgggcctgttttagtgtggagatttagttaagcaggtgaggacgccgccggtacggccagcggacggagttgtggggtgtttatatgagtctttcgtcccgggggtttggcatcgctggctggagaaggagatactgtggttttgttttcgcaggcggagccggagagaatgatatccggctggactgcttcttcgagggatagctctaagacagaggaaggcaaagcccccggggttacggacaaattcgctccgaactccgaatgagttcgaagctcaagttgtcccggattttgcccttgtagggctaaaatccgcccggcgcgctttgtctccctctgcctaagagctatcatctctcgggcgaacgtccttccggatatcattctctccttctccgccggaagatgtcggcagtatctccttctcccggaaggttttcgccggaacgaaagactccgccaagtgtatcggccccgtccactggcctgcggccgctgattgtctcacgcgttaagtgcgggggcggaccttgtctcggccactcagtactaccatgtgcgggaaatatgatatgccttcaatgcgccttttataaaaattgcggaagaattgatatcagcttgccggaaacacgtagtggccgcgacagggtcctccccatttaaggttggagacaatcagcgcccggaacggaccatgtccggtgccgcgaaaacttccgcctgagtgttccgtacccggcgaaaacctgacccggggaagtaggcggaatcaattgcggaggggacatgggagtccgccggtgcttggcgaggtccctcacgagcttagcactgctgcgcactccaaagagtgcaaacgatccccgcagcaattcttccggccggattcccctccacaaccaacttcccacggggcggaagactcagccagccccttaccacaccggacatggtccgttccggacgcgtcctccaaacctcagttaaatctctattttaccgtctcatgctgatccagcggttttacatggatattgcttctgtattccgtctcggcccagttgatggtttctgcaatataggcctcaggattcagggtcaccccgtcaagcataaaatctttgaacttctggtaaccggctctgtcgataagatgtcctccgtgaaggtagaccggttttccgcccagaacccattcggagaatttgggccagttgctcatgattgccagtacgctgtcttcggtcagccagttggcaaacattttacccattctgggatactgcttgcctgttcttcctccgatcacaatcttataaaagtctttgtccggccgtctccatgcaccggcgggacaggcgatgacgcattctccgcagcctacacagcagcaagggtctttgtcaacctttcctttatcattcagtgaaaggacgcgggttgcggctcctttgcatttatcgacacaggcgccgcagccaatacaccggtcgatatcgtagatcggctttgtgcagccgataatgccgaaatcctggaaatgccctttggcgcagtcgttggggcagcctgctatggataccttgatatggtatgggttggggtagactaatttttcaattttatgggccatttcctgcgtattgacattgcccttaatgcaatggataccgccgatacaggccataatgtttctcggcccgataaaagggtagccgttggaggtgtccatcttcacgtcgcacatatcgcgttcgattgcgtccaggtaaggacgaatgtattcatttaccgccggaatattttcggctttgatgcccggcacatttaaggtctgccgcattcccagatggaatgagccgttgccccaggtattacatatgtagcttacaagctcaagccatttcgcgtcgatcaccgctcccggcacgcgaagctgcagcatgaattctcctgcaaccttggactggcggaaacagttatttcttaatttacctatatttatatcgctcacagcaatttacctcctaatctaccagtttttttccgaccgtataattaaatacaggcccgtccagacagacataagtttcgtcaattctgcaatgtccgcatttgccgatggcgcaggacattttcctctcaaaggacatccagattttatcctcgggaacctgatgttccagaaggctttttgctgcaaatttcatcataaccggaggccctaccacaagacattcataattgccgccaaatgagctaaaggggatctcctttacaaattcagtgaccattcccttattccagccaggatagtcctcattgtccagagtgcagatgacatggaaatgacctgcctgtttccactgttccagttcatcggtaaacaaaatactctgtgaatttttaaagcccaggattaaatagatttcttttgcatagccaggctccgaatatagctggttaatcaggctcttgaccggtgatactccggttcctccggctatgataacaacattctttcctttcagctgttcggtgggccagccgttaccgtaacatcctctgataaaaatattactgccttttttcaggttgaaaagttcatccgtcacctttccgacctttcggattgtaaaatcggcgtatccgtcgccaaagccgctgatggagatgggagcttcaccgattttaggcagggagagctgcatgaattgtccgtgtctgatgggaagttcattttcgacccggaaggtccactccgcatccgtctgttttaatatatcgatgattttatgtgcctgtggctttaccggattattgagcatggctaacttcctcctcttgctttatttctttaattgcctttgacagcttattcagcgtttcgggatatccgatcaactgcggacaccttgccgaacacctgccgcagcccacacacatcgggccggtatgaaatctcgcgttatgtccgtatactttatgtaatatcttatagcggtatttttcggaaattttatgacggaaacaggcgcctccggccatgcggtcaaagccgtccaccatacaggaggagcaggttctccttctttctccggcctttccgttctgtgtataaataatatcggtggtttcaaaacaggtacaggtgctgcaggccacggtacaggctccgcaggcaatacatctggcgtcgaattcatcccacatcggatgagacttcagtttgtttgccagatcgagattatcaatcaccggaaaatcaacctttaatttattttctgccggaaaggtgatttcataatctgtctccccgcatccgtcaaaatatttgctgaagcagtcatcctttacctcgatgtacgctccgtcctcaccaaaagaaaatgcgatggagtgcatatccgtgacgttggagcctgtgctgcagcagaaacagccgtcaaattgttcctgacattcaatcagcgcaaactttaccttttcccttctcctttgataaaaaggatcggcaacgccgccgttctcatagtaaatctgatcctgaatctttattgcattgatgtcgcaggcccttccaaaaacgagcagatccctcgagtcctcaagcttgctctccctgaattcatcatcggtaaaatagaataaagtctgggtaatcggagtgatcacctctttcattgcataggtagatctctcgcggaactctatctcctcgtaccgctcaacctcccgatagaggatggaatcttgtcccgaatatctccctccggaggggattctgacaggcgcataaatagcgtacttttctttcaggacggcaaaaagtttatttatgtctgctattgtaagctgataggtttttgggcttctcatttttttacttcctttcctgtttttgccctgcgggctggctgctatggctgaccgtaccagtgaacagaaacatgatgaaacatgataactattctgttactgttctgtgcatcgcgaagcatgttgctggtcacagaactgcgttttacagcagggctgtgaacagtaacgctattctatgtaagtctattataaagcttgccctgccattcgtaaaatgctaaacttgttataaactcatagcataatatctatgtattgcagggagcggacaaaggagaaaagattatgacgatccgggattttgagatttttattgccgtggccgaaacgggtcagatgggggtagcctccagaaagctgtatatcacacagcccacggtcagccatgccattatgcagatagaaaaagaatatcacgttaaattatttgagcggctttccaaaaagctttacataacggaaacaggcagggaatttctggaatatgccagacatattactgccacctatcatgagatggagcaatttctgtatcatgcatcgagccagcagtgcattcatataggggcatcccttacggtaggcagcttttttctcagcgatatcatcaccggatatgaggcggaaaacccgaatgtgaatatccgggtttatattgataactctatgaacatcatccggaaaatttcagaggggaccctggatgttgccgtgattgaggggaacgtaaagacgagggatgtgatatttaaagatatttttgaggatgagatggtccttatctgcgggaaaacccatccgtttgcgggcaggtcctccataaacctgacggatttggcggggaaggcttttgtactgagggaagaaggttccggtacgagagaatttcttaccgatctcaccgagaacagagggattccgattgtagaaaaatggatctgccacagttctgattccattattaatatcgttgcctcaggtcagggagtctctatattgtcaaagtcattgttgagacaccatgatgaggttaaccagattgcaatcaatgattttcctttgaaaagaagctttaaaatcgtttaccacaaggataaatttctttccacgggattaagaaaactgattgccggcattgagaataagtttcacagtaatacctggtaaaacgataacctgcacgctccgcatacaggtcaccgtcatcaatgataacctgcacgctgagcgcacaggtcaccgccttcacattgaaggcggtggaaaaattaatgtttcaggccatacgggctttccctgcgtctgcctgtataccgtagactacgcgtgcagtcacggcaataagtacgacggccgcgcccataatggacttgcttcccggagcctctccgagaaaaagaaatacccagaccggattcatgaccggatcaatgatgggaaggagaaccgtctcgagagcggagaggccggtgctggcggcggcgtagagcgtgtaggtcagcgcgcacaaaataccggccagcagcaggaagaaaaatccgctggtatctaaaggcccggctgtcgcaataaacggaataccgacgataccggacagaaggttgccgaaaaacatacagagtttaggatcgccgtccttttccagacgcaggaaaatagagattccggcaaaggagatgccgttaaacacagcgatgatcttgcctgcggtactgcctccgccggcttcgtctgtaaagaagaggaacattccgccgaatataaagacaatgctgataagatcggctttcgtgatacgctcctttaaaaaaatccaggccagcaccgcaacatagacaggggcggtgtattgcatcatgatagcgatggctgaggtcgccagcttggttgatatgataaaacagtagttaaaaattgtatagcagacagcccctccgatcacgttccggctgatatgaagacttttgcctttcaccaccatgggaagcagcagaaccacggagattatgctgcgcccggccgcgatcgcgtaagggctccaggtgatcattttgatgttccatccggccagactccataacagagcaataccgcaggtcagtataatggctttcttgtgactcatgatgttgtattcccttctttcatgtactttattactccggtataatttcgtcatctttataatgcgcaatgccccatccggtgaaaccgcagattaatcccatcagaggagtcagatagcataaaaagatgtaaggcagatattctgtaaaagaaacgccgatagtccctacgatataaagcgccgtcgaactccacgggatcatggttccccgatggtattgcagtcttccataaggcgcgacaggttttccggttttaagcgtttttctttgtagatatccagcattgtggactgcagcataacatccgcaaagtaatgggagccggaaagcatctgtgagatgtatccgataatttccgatatcagaatcaaacttcctgtggagcggattagtttggcaagctgttttacaattacgtggataactcccatttccttcatcatgccgccgataccgacacagaatataatggtcatcgaggtgctgagcatgctggtgattccgccgcggttaagtaaagatgtaaggaaagcattatcaaattccctgttgaaaccgttataaagacagttaaatgctgctgcagacggagaaccctggtaaaatatggcaacgagaatgcctgtcagggagccggccagcagagccatggtcggatttttgcgcataagaagcagaacaagcacaacgataattgggaacaggaccggaagccccagtttaaaagtcgaggcgataccctcctgggtcgcctggatcaatgaggcatctaatacgctgctctgcgaaatgcggagaccaagaacggaaaagagtgccagggtaacggcgtaggatggtccggtggtgtacatcatatgcttaatatgagtgctgagaggagcgccgacgatggcagccgtaaaattagtagtgtcggacagaggagagattttatcgccgaaccaggcgccgcagatggctgctcccgccgtcattccggccggaattccaagaccggccccaataccgattaaggctacacccatggttccgagcgttccccaggaagtgcctgtggctacagaaaccacggagcagagaagcagggatgtgggaagaaaaaactttgcgctcatgatattcattccgtgataaatgatggccggtacggtacccgaagccatccaagtccctgttaaccctccgattgcaaagataatgaacagtgttgtcagaatgccggaaagattctctgcggcttttttctcaaggtgattgtagctgatgcccagcggggctgcaagagcggtcatgagaagccagttaaggaacataaccacgtttaatgaagcgccgaagagcttcatacctgaaaaagtgcttgccgccaatgcgattagaacaaaggcagaatatccaaaagacggtgttttaaaagttttgctgttatccatttgtgtataccccctgtataagtaaatgatttatgaccggcactgcccgatgaagtcggcaaagaggcagagcgattcgtctgattttgtgagaagcatttcgggatgccattgtatgcctaaaatcttttgtcccggaacacaaaggccttctgcgattccatctgcagaccgggcgcagatctctacgccttttccgcattcttttacggattggtggtggatgctgttgacatccagaacagtccggccgtatatcctgtgcagcggagagccttcgtccagcgtgaccgaatggacggcgtcaccgcggatataggtataggagtggccgccgcagccggggcactgggaaggaatatcctgatacagtgtaccgcccaatgccacattaatgagctgcatcccccggcaaattccgagaaggggttttccctgacggatggcttcgcggattaattcgatgtgggtccggtccatgtcaagatcaaagataccgcagccgggatggggcatttcaccgtagagtataggggctgcatcgaggcctcctgtaataatgattccatcacacagtttgacatactggcgtatttcgtccgggctgcatacaggcggaaccggtacggaaagaccgccggccttcttaaccgctccgatataatcgccattgacaatcactctttccattccggtgagattggagccttctaaaaacattctgcctgttgaaagccctataacgggtagatcattcataataaattcctccatttgtaatttggtagtaataaacgcgtttgtctttattaagagcaaacggcgtgccaaaaatcaaaatacagggaaaataaaaaggggaaaagtgttggaagtgtctatttacaatggaaaaatatggataaaaataaaatatgccgatacttttccgtatcggcatgattgataataagaaccgcataaaggaataaatggtgttaaaaaactataattacacaatttattcactatttattgcggaataactggaagcgcactccagaaatgcagtacctgcttctgtaaggcagatgccgccacgcccctgtttctgacaatatagccggattcctgcaatttacttaaaatgcgttccattctgttttcactgatggaaatccctctctctttcagctccagcagaagacttgtccgcccggaggtctgttccgcccggctgcgggagtaaatcagagtcataatctgattaggcagttcatgggctgtccggcagttcgcagtggaactgatgctgccattctccatgtctgtcggaaggcattccagattttccatcagcttataatattcggcagcattttttaattcgcgtacattgcccggccaggagtagttgagcagctgtttccggacagaaacgtccagcatactttcgtcgattccgcccagacggcagaaaagggggatgatatcggcttttcttgctgccagcgggggaaggcagagcggaaaaacgttcaggcggaaaaagaggtcttcgcgaaaacgtttttcgtgtatcatttctctcaggttacagtttgtggcggcgaggacacggacattaatgctgatgacgctgcctccgccgacccggacaatctgctgctcctggagaacgcgcagaagcctggactggagcgtgtaaggcatatcgccaatctcatccagaaagatagtgccctcatccgcctgctcaaagagtcccatgcggcccccgcgctttgcaccggtaaaggcgccttcctcgtaaccgaaaagctcgctttccagcaggctttcggggagcgcggcgcagttgacggctacaaagggtttatttttccgcggggagtaattatggatggcctgggcaaacagttctttgccggtgccggtttcacctgtgattaaaattacgttatcgctttccgccacttttttcgccagagtgatgcagcgctccatgtgcggatcgcgatatatgatatcgtcaaaatggtatcgggcgaaaagtccctggcttttcagcttgcggctcagctcgctgccgtttttccgtatctgcgatgcggaatcaaaggtaagacagtagcctgaaatctgtcccattgtatagaacggattccgctttaccataaatggcttgccgttcaggctgataagatcatcggaaaagtcgggggaagccatcttctgcgcatgcacggcaggaaaacaggaggacagtgccatctgaaagagagggcgtttctccatgatatgctcggcttccgtattccagtaactgatatgaaattcagcgtcggtaacaataatcccggagttctgcagactcaggatctgggtcagggtttcgctgagcacgtaactttgtatataccgttttttaattccggtatgtaactcgagcgtactgtccgcataccggagaagggcctggctgaaggaaccggaactcagattcaggagcggcagcatatctaaaaacgtctgcatatcaaggcgccggtttcctatgtcgatgatattgggaatggattccggaacacggtgccgttcgcccggggtgacggcaaaacagatgtctgccagattatccgttttctgcagatagggtaacaggttcaggtgggtaacgcctaattggtagagcatggagacggtttcactggtggtctcgggtgaatcgttaactaccagaacgcggtttcctttaggtatgtcatagagacggtaaatggcgtcttccgataccgtacgggtaacgaggaccacctttttggggtcggaaatatggtgctgcaattcctgcatggtgccgggacgcattatcaggaaaacatcgcttatcaattgctctccggctctcagttcattggtgtaaacggtgcttatttctacggtgccgccaaatacaagacgcaagtcccgggtcaggttgcttattaacgcggaggaaacatgtgacgtaaatgtaaaagtgattttcttctttttcatgggaacattcctttaggtttaggtgaaaggttgattttatccgtatgtattgaactcagtatagccgaaaaggacggacgaatcaatgtgaaaagtttctaacgcttgcaactgattagtgcatgcattatactagagtgtgtctgcaaattcattcccatcatctgcacgctctaaacagtaacggcagaaggatacgtggtaacttaaaaggagagtaatattaatgagaattaagtgggcggcaattgcagccgcgattatgttaacaagttcggcccagacggtttttgccggagataccgtttatgtaaactgtgacgtattgagatgccgttcatcagaagaaatcaaagacggcaatattgtaacgaatttctattatggagataagctggagcgggtcggttccgacggcgaatggaccgcagtgcttgtgaacggacagaagcgctatgttgcatcggcctacctgagtacggcacagccggttaagaaggcggctgcacagaatacatcgggacagagcggcgcggcggcttcgggaaactctgattccgccgtatcaggtacggaggtcggtttgtccgcaaactataagtatgccgagttttccaagattaacagtggaaaagcgattctgtacaagagtaccgccgcttccagaaagaataagacggtctgcgtcaatgcgggccacgggacaaagggaggaagcagcgtcaagacgctgtgccatccggacggaacgcccaaggtgactggcggaaccaccggcgccggagcgactacggcggttgcggtttccggcggaatgacgtttgccgacggtaccgcggagagcaaagtgacgcttcagatggcgaagattttgaaggaccgtctgctggcggaagggtacgatgtcctgatgatacgtgaatcggacgacgtccagcttgacaatattgccaggaccgtaattgccaataataatgcggactgccatatcgcactgcactgggattccaccagcagcaacaagggctgcttttatatgagcgttccaaacaatgcctcttacagggccatggagccggtggcgtccaactggcagcagcataataagctgggggattccctgataaccggtctgaaaaacgccggaaataaaattttctccggcggcagcatggagatggatctgacacagacctccttctccaccatcccgagtattgatattgagctgggagataaggcgtcaagccattcgacggaaaccctgaaccagcttggagacgggctgacagcaggaattaatgcattttttggtttttaacgcaggaagcgctgtttcctttcataaatcgtggtatttatggcagaaacagcgcttttttcagcatttcctgttaacaggccgttaaaaaaccttggattgtacggagatttgtacaaaatgcttaattttgttggattttacaactaaatttctttgcaattgatattgcattttttaacctgaagtaccataatatggggaagcgaagaagttgagggccttttccgggaatccgattacaggaaaccggcattggccttttgtaatttacggtgacaggcccctgggggcatccggccgccggttactgaaacatcttcacaaatactattataggggagggatataagacggacacactttcaaaggccctgatggaagaattgaatgccaaagtcgtattcacaatacccgtattcggcggaatcccagtatacgagtcggttgtggcgacatggttcattatggcggttcttgttcttctttccatcatctttgtaagaaacctgaaggtggaaaagccggggaaactccagttgtttctggaaacttccattggctttctgagggatttcttcctggatctggtcggggaagaagggaaaggttacattccgtatctgatttcgacggcgctctttatcggcgttgccaatctgattggcatagcgggtatcacaccgcccacgaaggatttgaatgtgacggccgcgctggcagtgatcagcattgcggtaattgaatatgccggatttcataagaaaggcatgaagggattcattaagagttttgcagaaccggtggcgtttatactgccaatcaacattatggagattgccatccgtcccgtgtctctgtgcatgcggcttttcggcaacgtgctgggctcattcgtagtaatggaattaatcaagctggtggccccgcttatcgtgccgattccgttcagtttttattttgacatttttgacggtctgattcaggcatacgtatttgtcttcctgaccgctctgttcatcaaagaacagcttgattaaaaaaatattcgaatacaaaaattaaaggagagaattattatgtcaacattaatcgcaatcggagcagcagtggcagtacttacaggtattggagcaggtattggtatcggtatcgcaacttctaaggcagtggaagcaatcgcaagacagccggaggctgagagcaagatcagcaaggctcttcttcttggatgcgcccttgcggaggctaccgctatttacggttttgttattgctcttgtaattatcttattcttaaaataactgagaaaggcaggtgggagaagtgttacagttaaactggaaccttgtctttgaaatcattaacctgattatcctctgtcttttgttgaaaaaatttctgattaagcctgttacggccgttatggataagagacaggcaatgatatccgacgggctgtcaaacgccagaaacagcgaggcccaggcagatgaacttaagaaccgttatgaagcggctctcagggatgccagaaatgagtccggacgtttgattgaagaagcgaaaaaacgggcgcaggaggaatcggatcggattctgaaagaagccggagatcaggcggcagatatcatgaggaaagcagagaaaaatattgaaaatgaaagagaaaaaaccatggctgacctccagtcccgcattgctgaactggctgtaagcgcggccagaaagatgaccggggataccgggcacggatcggaagattcgctgctgtatgaccgttttttaaaggaggccgagggacatgagacagacatccgttaattacgcccgcgttctggcagagctgtccgtcccggcagacgatttgaggaatgccgccgcgatgcttaaagggacgcccgctttgaagcagatgcttgaaaatccgctgattcccagggagcagaaggagagggtaatcgaccgggtatttccggagtccgtcagaaattttctgaaggtggcctgcctccatgaaaggacaggacaaattgaggaaatttttgaatgctacgaggaatacttaaggcggcaggatgggatcctgagagccgagcttacctgcgtgactccgccttctgaggaacagcttcagggaatgaagaaatacctttgcagaaggtaccggaaaaatgacgtgaccttcgatatccgggaggatgcgtccctgctgggcggcttcatcctgaaggcaggagattttgaatatgactacagcctggacggacgccttaagaggctgcagcataaattgacacggaggtgagaagagtgagttcgatgagttcagatgaaattatttccatactgaaagaagaaattgaaaattatgatgatatatgcaaagagcaggagacgggcaccgttatctccgtgggcgatggaattgccagaatctacggcatggatcatgcgatgtacggcgaggtcattacctttgagtgcggcctgaaaggaatggtgcaggatatccggcaggacagcatcggctgtatcctctttggcaaggatacggagattggcgaaggaacccgcgcttccagaaccggaaaaaaagctggcgtccccgtgggagatgcctgtatcggccgtgtaattgatgccctcggcgccccgattgacggaaaaggagagattaagaccgacgattaccgtccggttgaggaggaggcccccggcattattgaccgccaggcggttaaccagcctctggagacgggaatcctgtcgattgactccatgttccccatcggcagaggccagagggagctgattatcggcgaccgtcagacaggcaagacctccatagccacagatacgattctgaaccagaagggaaaaggcgttatctgtatttacgtggcaatcggccagaaggcatcaacgattgcaaagctggtctccacctttgaaaagtacggtgcgcttgaatatacgacggtcatggcgtccactgccagcgactgtgcgccgctccagtacattgcgccgtatgcaggcactgcgctggctgagtattttatgcacaagggaaaagatgtgctgattgtatatgacgatttgtcaaagcatgcggtggcttaccgtgcgttatccctgctgcttggacgttcaccgggacgtgaggcatatccgggagatgtattctacctgcattccaggctgcttgagcgttccagccgtctgagcagcgcgctgggcggaggctccatcacggcgctgccgattattgagacccaggcgggggatgtgtcggcttatattccgaccaacgttatctccatcaccgacggacagattttcctggagagcgatttgttcttctcgggtatgaggcctgccgttaacgtcggcctgtccgtatcgcgtgtcggcggtgcggcccagtttaaagcgatgaagaaggcctcgggaagtatccgtatcgatttggctcagtaccgtgagatggaggtatttacccagttcagctccgatttggacgctgcgacaaaagaacagcttcaatatggaaaatcgctgatggagcttctgaaacagccgctctaccatcctctcagcctccatgagcaggttatcacgctctgtgcggcaacccataagatttttatggatgtggaggtaaagcagattaaggaattccaggaggatatgctccggtattttgaacagattcatcctgagattgtaaaagagatagaagagaagaaggaactgccggagacgctgattcaggcgattgtgaaagcggcaggggaatataaagctgacagaggcaggtgatgacaaatggcaagtattaaagagatccagaccaggatgaagagcatccaggacacgatgaagattacgaatgccatgtatctgatatcctcctctaagatgaagaaggcgaagaaggtccttgcggatacggagccttacttcttcggcgtgcagcgcgcgctggaccgtatgctgcgccatcttcccgatacggaaaaggaaaaccggtatctggatcagcgccctgagatagctcccggggatcggaagatcggcctgatcgtggtcacggccgacaaggggctgaacggcgcctacaaccataacattatcaagatggcggaggaacgcctgaagcttccgggacacaggaagctgtatgtgctgggagtagtcggccgacagtatttcggcaagctgaaggatgtggatatggacggcagcttccgctatacggttcagaaaccgaccatgcaccgggccagattgatttccgagacaatggtggacggatttctgaacggggagctggatgaagtctttatcctgtttaccgagatggtaaattcgatgaaagaggagccgaagctgaaacagctgctcccgctgaaaaaggcagatttcacgatgtcgaaaataccgtcgggagtcatgcaggagaacatcagcctctacccgtcggcagatgaagtaatggacaatatggtgccgaactatctgaccggcatcatctacggatgtctggttgaggcgtatgccagcgagcataatgccagaatgatggcaatgcgctcctccacggacaatgcaaaggaaatgctccgggatttgtccatccagtataaccgcgccagacaggcggctatcacgcaggagattacggaagtagtcagcggcgccaatgcgcagaaaagaaagggataattatggacacaggcagaattattcaggtcatgggacctgttgtggatgtttcgtttgaaggcggagttctgccccacctgagggatgccctgaaggttcaaaacggggacagaacttgtatcatggaggccgcccagcatatgggaaataatgtggtccgctgcattatgctggccgccagcgagggccttcataaagatatggaggtgattcccacaggacagggaatcagcgtgccggtaggagatcagaacctggggcgccttttcaacgtcctgggagagacaattgacggaggggaaggtcttaaggatcaggaacactgggtcatccaccgcgatccgccttcgtttgaagatcagagtccggtcgtggaggttctggaaaccggcatcaaggtaatcgacctgctggcgccctatgccaagggcggtaagataggactgttcggaggcgccggcgtcggcaagaccgtcctgatccaggagctgattcagaatatcgccacagagcatggcggctattcgattttcacaggcgtgggagagcgatccagggagggaaatgatctctgggttgagatgaaggaatcaggtgttctcgaaaagaccgccctggtattcggacagatgaatgagcccccgggagcgcgtatgagggttgcggaaacaggtcttacgatggctgaatatttccgtgacagggagcatcaggatgtacttttgtttattgataatattttccgttttgtacaggcgggttccgaggtttcggccctgcttggacgtatgccgtctgcggtcggctaccagccgacactggcgaatgagatgggagaactccaggagaggattgcctcgacgaaggagggctccgtcacaagcgtacaggcggtctatgtgcctgccgatgacctgaccgacccggctcccgccacgacgtttgcccatctggatgccacgacggtgctttccagaaagattgtggagcagggtatctatccggctgtggatccgctggagtccacctcccgtattctggaggcggaggtagtcggagaggagcattacgagacggccaggcgggtgcaggagattcttcagaaatacaaagaacttcaggatatcattgccattctcggtatggaggagctggcggaagaagacaagacaaccgtatacagggcgaggaagattcagaaattcctttcccagcctttccacgtggcagagacatttaccggcgtaccaggtaaattcgtgccgctgaaggagacgatccgcggatttaagatgattttggacggtgagatggatgactatccggaaaatgcgttctttaacgtgggttcgattgaggatgtgaaggcgaaggcagatcatgaaaagacagagcaggagaagacgggaggccggtaagtatgggagaaatatccacatttggccttgagctgttttccagcagccagattttctacaagggaagggccagatttatcaaccttcctgccacggacgggggccacacatttctgccccaccatgaaaatgtaatcattgccctggtacccgggactacgaaaattgtaacggaaaccggcgaggagatcacggctgttacaggctccggctttgccgagatgatcaataaccgagtccaggtttttgtccactcggcggagcatcccggcgagatcgatatcaacagagccaaagaggcgctggagcgggcggaggagcagctgcgccagaagcagtccattgccgaataccacagaagcaagatggagctggccagggcgatgtcacggctcagcgaggcaggaaagcgcaaataacaaaatcgaagaaagcttgaaacgcaaaaatgcggcgggaatgtaatatgctcctgccgcgtttttttatttaacaggagaaacttcctgttaaataaaaactgatccgaggggaatcccggggattctttctgatatatccacacgttatgttgcagttcagccttcggccaaactgcaacaaatgatgcacagaaacggcaaaaaaagtcgtttcgcgccgcttaactcgggattttcgcaaaaagcagcgaaaacacctcgcggaatacatcatggctgaactgttaccacgttattcataagtcaggttcatcacaatgccctgtggataatccccgtatttttccccgaaaatgttgattcccccgatatgcttggcattgtctttgatttcgatcttcagtgagatatagggcctggattcgatggctatgtccctcaggctgatcccggcatggacaaggcgtccgtccatataactgccgttttctttgacggagaatgtcttaagcattccgtactgtgtatttccattgggccaggccggcggagtcagttttccgcgccgggcgccatagtcgccgggagagcagtagaccgccgtctccacgccgttgattgagatagttatatctgagggccagttttccagatacccgggagcctctgaacacagttcaaaacggaaggagatttcattcagggtgagcagcgggttgtggatattggggaaacggtattcaataaatcctttgtgaaaccaaatgagctgcgccctgcttctcacgggagagtagaaggaacggaccgtgtcataggagtcgatggggccgttttcatcagccaggccgcaggtgggctgaacatcgcaggaatagtaattccctatcggcatatccatggaaatactcttattgacggagtcgatggaggaatcgaaggtttctaagtgaaaggactggatgctgcaggtacaaacccgcatggagccgtgaaccccgggctgagtctccgtcacgatgagatgggcctcctccagtgtctttacatggagcgcggcggaggacagggggatgtccagaatcgaagcgatttcctgcagggagcgcgcggtatttctcagcatatccaggattttcagacgaagaggcgaagagagggctttgcctattttcgtaattgactcatgatgggctggattgcccagatgcagataaatatttctttctccaataattctgacagtacgtttttccctgggtgacatgacagattcctttcttccattttttatatttttcttctattaattataactctttattacataaaaagtaaagtaaaaaagcaacttttacaaaataaaaacgataaaaatgtgaaatatatacaaaaataaaaagaatatataaaagtatattgtaaaaagagacgaaacgatctaaaataaattatgtaataaaaacgcgcaataagtaagggaggaaattattatgaagaaaatggttgcattagcaatggcagcaacaatggcactgtcactgaccgcatgcggcagctctgagaaaccggcggaaactgcggcgcctgcgacggaggcagcagctccggcagaaggctcatccgaagcggctccggcagagagcacggagagcaaaaaagcgctggagggtaagaaagtgggattcgcccaaaccgacagtatgtcggcatggaggacaactgagactgacagcattaaggagtatgttgaaaatgcaggcggcgaattcatcgtgaaagacgcaggcggcgatattgccacgcaggagtccgatatccgcgatctcgtagcggcaggcgtagattatctcgtcgttgcaccgcttgagaataacgggcttcagggcgctttacaggaagcaatggaaagcaatatcccggttatcctggttgacagggcgattgacggtgaagcgggaacccattacacgacggcgatcatgtccgatttcatctgggaaggcgagcagtgtgcgaaagcgctcacggaagcattgccggacggaggaaatgtcgtaattatcaacggcggctatgattcatccacctccacagacagacaggacggatttgtaaaaggccttgactcctccaagttcaagattgtagcggaacaggacggcgagtggctgatggataaggctcaggctgttatggagaatattatccaggctcagggcggagagaatattgacgcagtattctgcgtaaccgatgatatggttcagggtgcgatgaacgccattgaagcggcagggctgaaaccgggcgaagatatcctgacactgggaatcgacggaaccagggcggcatttgaggcgattgaagatggaagacagcttgcttcctgcacctgctccccgtattttggcgagattgtagttgaaactattacgaatatcatcgatggaaaagaggttccggctcatatcacgaatgaagataccctttatacaaaggataacgtggtagtggaattaggtttctaatgatttatcgttcatgaacggtggaaggcacgtttctgcagcctgtcaccgacgaaagcaattttcaaacacgcgctataaagactgccgcaaaaatcagattttttgcggcagcctttttgaaggaatagtttgaaggaagagattgaaggaagagtaggaaaaaggttactgtatcggccgcaggactgtgctgtttggcagtctgtgaacagtaatgtaaaaaggagacgcttatggcagaggttttactggatataaaaggtttggagaagacatttcccggcgtcagggcgcttaaaggagttaatctgacggtgaacaaaggtgagatacacgcgctgatgggggaaaacggggccggaaaatccacgctgatcaaggtgctgacgggaatctaccagaagaacggcggcacgatttgctttgacggagaagagataaatgccaggacgccgatagaggcaaatgaaaagggaatttccacgatctaccaggagttaaacctggttctgttccagacggtttatgagaatctttttctgggacgggaaccgagaacgaaattcggcagcattgacagaaaagccatgatcagcgaggcaaaaaggattctggaggaactggggattgagattgacgtgaccaggccgttaaaaaattattccacggcgatccagcagatggtggctatcgccagggccgtgagcatcaatgcgaagcttgtgattatggatgagccgacctcttcgctggatacccatgaggtgcaggtgttattcaggattatcagacagttgaaaagtaagggaatcagtgtgattttcatcagccataagctggatgaaatttttgaaatatgtgaccgcctgaccgtatttaaagatggtgagtatgtgggagactacgatatcggtgagctgaaccagcttaagctgatttcactgatggtgggaaaggacacggtagagcttgaaaggaacaagcagggatatgagttcgcgaatgcgaaggtcatagccgagatgaaggacatccgccaggggatgcggcttaacggcatcaatattgagattaagcagggggaagtggttggccttgcgggcctccttggctcggggaggacggaactggcgcaggtgctgtttggttccggcatgcctgataacggagaaattttctggtggggagaaaaggccggtattcattctcctgccgatgcgataaaaaaggggatgggtttctgtacggaggacaggaagacggaggggattattccccacctgtccgtccgggaaaatattacgattgccctgctcccgaaactgaattcctttggttttgtaaagacaaaggaacaggatgaaatagttatgagttatattgaccggctgaagataaagacgccgacgccggagcaggccatctgtaacctgagcggcgggaaccagcagaaggtactgcttgccagatggatgtgcatgaatccaaagctgatgattttagatgaaccgacccggggaattgatgtgggcgccaaagcggagattgagcagttaatccaggaattttcaaagagcggaatatcggttttgatgatttcttcggagattgcggagctggaacggaattgcgacaggattatcgtcatgagggagggcagagtgatcggcgaactggccggggatcagatcagtcaggataaggtgatggaaaccatcgcaagaggcagtgaaagtgagggaaaagcgcatgaataagacaaaacaggattatctacagttcgtaaaaaaatacagcgcaatcacgctgctcctgttttttgtgctgttaaactccttattcaccccgaactttttcaggataggaaatttaaataacgtgattacccagctttgtccgaccatcctctgcgggatggggatgacactcgttatctccacgggaggaatcgatatttccgtcggttcggtcatggccctggcgggtgtgctgacagccaggctgatgccggagacgggacttcctgccgctgtgcttgccgctgtggcggtgtctgtcgtcgtgggctgctttaccggaattatggtcggcaagctcagattacaggcaatggttatcacgctgggactgatgctggggctgaggggcgtggcccaggtgctttgcggaggccgcgacatctatttcaacaagctgggggaagtgggaaaacagctatccctttggggaacctacaaactcgggggcgtgattccggtgcagattatccctattgtcctgtccgtggcagcagtctgggtgatgatcgaaaaaacggtgcttggacgtcagattcaggcggtgggagataacttaaggtccagctccctggcgggaatcaacacagccaggacactgatgattgtatatgggctgagtaccttctttgcagcatttgccgggattttccaggcggcgaaggtatcggtcgcagcgggaagctccctgggacagcttgcggagctggatgccattgcggcggtcgtcataggcggcacgccgatgagcggcggcaaggcccatgtgcttggaaccgtggtcggtgccctgattatgcagatgatcacactgacctgtgtgatgaataatataccggatcagtatgcccaggtgtttaaagcagcgattatcgtatttgcggtattcattcagagagagcaggcgaagtaggaggttaagaagtatgaaattaataaagaaaatatataattcgttttattcgagaagtactatcttagcatttctgcttctggtaattattacaagcattctatttcaggataaaaatttcctgacaactgccaatgtgtttaatattttgctgaaagcggctaagaatggcggatttttggctctgggaatgacatttgtcattctgtgtgcggagattgatttgtcggttggcgccgtgtttgccctgagcggtgtggtcatgggccttacggcccaggtgaatccggtgttcggaattgtctgcgggcttttagtcggcgtcgtctcgggccttatgattggcctgatggtcactaagatgcgcatctcatcatggatagcgtcacttgccatgctcttcgcgctgcgcggagtgattctgattattgcgaagaaatcggtggcggtgaccgggaatgtcctgaccttcgcaggaacaaaggttttaaagggtgtgatacccggaatgaacagcggaatttcgattctgatacctctcctgtttcttgtcacatttatctgtatgtatatatcgaggcatacgaaatttggaatggggatgtacgcggtgggaggaaacggcgaggccgcccggatgatgggaattgacgtggataaaatcaaaattaaggcgtttatctgttccggttttattgcggccctgtctggtattcttctggcttccagcagcggcagtgcaacactgagcgcgggcaatgtctatgagacgtatgcgattgccatgtgcgcaatcggaggggtaaagctgtcgggaggagaaggcaaattctcaggcaccttcttcggaattttgatttattttattatcaacacaatatttacttaccttcctaccagtatctcggtccactggcagtcgattatcatgggaatgctggtgctgatttcagtcggggtacagtccgaggtgttccagaatatcaaatttaaaagaaaacaggtgggataaagtatgatacagttaattagcagatgggggaaggaaattgacccgggaaatattttgcaggaatacccccggccgaatctagtgagagacagttactttaacctgaacggagagtgggaatgccgtatcaatgaatccgaaacggcagatttctacgatgaaacgataattgtccctttttccccggaatccatgctctcgggcgtgggtaaaatcgtgatgccgcaccagcgccttcattacagaaagaaattcactcttccggaaggttttaagaaaagccgggttcttcttcatttcggcgccgttgaccaggagtgcagtgtatttgtcaatggaatccggatgggaggtcataaggggggataccttccgtttcactttgacatcacggatagcctgaggcagggggagaatgtgcttactctttccgtgacggactggacggagcagtcccctcatgccagaggcaagcagaaactgcagaaaaaaggaaaatacgcctctcttttctacacacctcagagcgggatatggaaaaccgtctggatggaaagcgtggaaaaggcctatatagaagacgtgaggattacgcctctttacgacgacagctcggtccggtttgagataacggttcttaatgcctgcaaaacatccggcgcggaggcatccggtgggaaggcatctggtgggaaggcatctggtggggagacatccggcacagtgcgtctggctgttctggatcgcgggggggaaatcgggcaggcagagattaccgtccggcaggagaaggagataaagcaggtaatcagccaggagataaagcttgacgggttcaagccatggacgccagatacgccccatctctatgatgtgataatccggtatggggaggacgaagtgagaagctatttcgggatgcgcaaactatctaccggccgggacgggaaaggcattctgagatttttcctgaataacaaaccgtatttttttaacgggattctggatcagggctactggccggaaagcctgatgactgcgcccagcgatgaggctttggtatatgatattatcaagctgaaggagatgggatacaatacaatcaggaaacacgtaaagatagaggcggaacgtttttattaccactgtgaccggctgggaatgatggtatggcaggatatgcccaatgggggcggtgaatacaacatggtttttgtgacccatctccccaatgcctcggaccggttcgccaggggggtcagcgaccgtcactacggaatattcaaaagaaaggacggggaaggacggagacagtattacaccgatcttaagaatatggtatccacactgtacaattaccccagtatagcggtatgggttccgtttaatgagggatggggacagtttgatgctgcgaaggccacaaaagaagtcagggaaatcgattccgggcgtctgattaacgaggcctgcggctggtttgatcagggcggcggcgatatgtacagtatccataattacaggcataagctgaaggtaaagccgcagcaggaccgggttgtcgccctgaccgaatacggcgggtacgcctacccggtggaggaacatctttcctgtaagaaagaatttggctatcagcattaccattccaccgaagagctgacgcaaaattataagaggctgtgggaagaggaaatttatccgaatttacagtatggcctgtgcagtgcaatttacacgcagaccagtgatatcgaggaagagatcaatggtgtgctgacctatgaccgggagattgtaaaactggatgaggaacaggtgaaagagatgaatgataagctctatggaatgttcgattcacttgtatgagtatgaggatttaaatattagaagataattgaaactttttattctccggcagagtctaatctgtgaaagtgaaacaggacagacgaatttataagaaatgaggagaaagagatgagattatttttcacaaaaagatttatggcagcagcagtttgcgccgccgcactcacaagtatcataccggcagtaccggtttacgcgggcaccagaacccagcagtccagcaattccagaaatgaaaaaatgagaaaggcggcggagcaggtacagaaagcatttgaaaaaaaggatttaaacaaactggccgatctgtgcagctatccggtggtcgtctcctttaaaagcggcgaactggcggaattgaaaagtaaggaagagtttatggcccttggctcccagaccatcttcacccagaagatgacggatgcgatcgcctctaccaatgtggcgaagctgacggacggagagcaggccggtacaatgatgggcggagattacggattgactctttataaggtgaagggaaaatggaagattaataacttttacctggatgcgggttcaaccgtaaattccaattcagtgaatatcagcgatatgaaggagatggcggaacaaatccagaagacattttcatacaagagcctggaaaccttgtctaagatgtgtaattatccaataattatcaccaattccaatggaaagatgacggaaattaagtcagccgagcagctgatagcccttggtgaagataaggtgttcacagaaaagctgagcaaagagattgataatacggatatcacgcgtctcgaagaggttggaagcgccggtgttatgatgggcggagattcgggactgaatatgtacaaattcaacggttactggaaaatcaaccagatttaccagtaggcggaatatggaagatacgtaacagtttggccaaaggctgacctgttacgaagataccggtaagagcaggatgggtcctgtatcttaccggtatcttcagttaagatgtaattgagtcccgaacagccggatattttacgaagcatcgaggtaaaaggaggtgagtgttttgcctgccgctttgagcagagacgtcagcggcagcaggatattgtcgcgctttacggaggtctccttcaggaagcttccaattatctccataacattatccggcagaagaagctcgccggtccgggtggccccggaagaccggagaatatcgaagaccgtatcaacaaacgcccgccgttcctcgggggacagctctgaaatccaggtttttatcgtacggtcaaccagacagcttccctctgtgatttctttcagccgaatgaagtctccgtcccggatttcccaggaatagggatcatgctgcatcagtcctttcagcccgctctgtacaatggtataggactcttcatgcccagaagcatgcctactacagaggactgagggagaaaagttcggacaaggggaagcgcagtgcggtagcccggcgtatcaagaaccgcctggctgaagcctgggccgtcataattgaatacggcacggattcgcggcgtgatatcgggaaaagtgcaggcggcggaaaatacggccaggttgccgccctttgaatggccgcccacccagacagagcccgcggcaagagaggccatattcgacagataataacaggccgtccactggccaggaacagtatcctgaaagccaaggttgaaatcctccttccagccaatcaaagttccgtcggtaccgcggaaaacgacaaagatatctccggagccgagaagaagagtgatggcggagaactgcatttcaaggtcaggcgatttgatatccctgtaagcagtcagacgcaggccggagaagcggcggctctttgccatttcctcaagcagacgctggttttccagtgagcggacacgcaaaagccgcttcctctcaggcagcgcgagtatggcggccgccgtttctttgaccgcgggcgcttcctggggactgtctggtatcaggccgtcaaagtgaatgtaagacattgcggaaaaaacaaggccgtccacagcagacagaggaacttcctccagtgtcttactgccgtggacggcgacataatcaataataccgggaaaagacatattggaatcgggcatgacaaagccttttctttttaatatattccgcgccggaaaaaggtgttactgttcacaccatgcccaaaagcagcatgctgtaaacaataacacgcttcgcgatgcacagaaactgcaaaaacgcagtttcgtgccgtctcgggattttcgtgcaaaatgcgcgcgaaaatacctcgcggaatacaacctgtgaacagtaataaaaaggttcgccggtttagccggaagctgtcttaacgcttacagcatttttttggcatccttaaagaaggagacaataatcatcacaataatcactgcaatgggaaaggcagctatgatcgataccgtctgcagattggccatggaattatcgctgaataccagtgcgataggcagcaaaatcagcatgatggaccaaaataccttgatacccatatgaggttcctcgtcattgtcaagttccttataggaataggaagatgcgaccagtgcgatggcatcaaagctggttgcataaaaggcaatcatcgtgagcgccagaagaatcagtaccaggggcgccagcggaagcgtgcggacaatagcgataatcgtagtgtagagattaccggttgccgtatagagcccaatcacgtcgagcttgccgaacacctgtaaaccaaggctgtagttgccgaggataataaagctcgtaaatgtgcctccaaggccaaaaatatatccgcccagaatcgtttgttttaccgtgcgtccctttgaaatattgccgataaaaaatggtgcggcgacacaccataccatccagtacgcccagtagaaaatagtccagttctgcgggaaggaggtggttctctgcggatcggtaaaggtggaaagactcacaaaattctgaatcaggtttccgatggaggagaagcctgtctctataatatatcttgtctcgcctccgaatatcagtacataggccagcagcccgaagaacaggtatacacaggaagcggccagcttcatgatgccgtgcatgcctctgactacgcagaaggtgtaaacaatgcaggtaataaccaggattaaaatggtaatccactttgagttatcaattcccagcagatctgctgcaatctggctcatcagaggagttgccaggctgaaggtggtggcggtacccgccagcagggcgaatacggcgatcaaatcaatgatttttcccggagccttatcggtccggctgcccagcagagggcggcaggcctcggaaaatttctgtttatggcagccgcgcacatggagcataaatccgaaggatacggccagaatcagatagaagctccaggggattggcccccagtggaataacgggtatgtaccggaccattgctgaatcgaccccatctccgccatatgaggatcctgagcgtagagaatccattcacagagtgaataaaaaagaatatcggcagccagaccggaagtgaacatcatggatccccaggcgaaattggaatactgcggtttttcgctcccctttccaagacggattttcccatatctggaaaatgccagaaacagagagagaataaaagctcccagccccacggccaggtaataagttcccagttcctctcctaaaaaggtacggattgactcaatgatatgctttgatgaatccggcagaaagataaagctgatgcagagtaaaaggataattaaaaatggaattgccatcgtaacccagtccagctctttctttatagtcgttttgatgttttctttcatagctgcctccttgttgttcaattttattgttttaaatcaaatattgaacatattatagcattgaatttgaagaaatacaagagtatcttgaaaaaaatggagatttaactgaggtttggaggacgcgtccggaacggaccatgtccggtgtggtgaggggggcgggctgagtcttccgtccccgtgggaggttggtcgtggagggggaatccggccggaatgaattgctgcggggaccgtttgcactctttggagtgcgcatcagttttgtatcggccactacgtgtttccgcaggcagatatcaaatctagcgcctttcataaaggcgcaatgaaggcatatcgtacttcccgtaaacggtagcactgagtggccgcgacaaggtccgccccgcacttaacgcgtgagacaatcagcagccgcaggccggcggacgggcgatacccttggctttaagtctttcgtccctgaaatacctgaccttggggcgaaggggaagatcaagtctgcggatgccgcctaaatccatcgctgattagcgaggtcctctcgagcttagcagcgcgatgcatttcacagagcgggagtgtgctccgcagacttgatcttcgcccgaagtcccaaaccacgacaatcctcccccgggacgaaagacttatatacacacctcaccaccccgtccgccggccgtaccggcagcgtcctcacctgcttaattaatttcttgtttacgaacgaaaatggagtgtgctatactagtaaaacagtacctcttatgcaatatgacatggaaaggagagcggcatcgccgcgggatcgggaatgacagaacgccatacgaagatattggatattgtcagtgaagagaaaaaagtagaagtgaaccggttatctgagatgttgagtgtttcacaggttacgattcgtaaggatcttgatgtgctggaggagaggggccttctttccagggaacatggctatgcggttatgaagaatgtggacgacatcaataacaggatggcggtccggtatgatacgaagctaaaaattgctaaagaagcggcaaagagtgtggtaaacggtgaaaccatcatgatagagtcgggatcgagctgcgccctcctggcggagcagctggcggcggataagaaggatgttacgattatcacaaattccgcatttatagctacctatattagagaagtatccgtagggagagtaattcttctgggggagaataccaaaaggagtcacaggtcatggtaggccctcttgtcaggcaatgtgcaggggaatttttcgttgataaactgtttgtgggaaccgacggttttctgccggaaatcggttttaccggcggtgacatgatgcggacggaggcgatgaaaagcatggctcagtctgcgaagaaggtaattgtcgttacggattcaagtaaattttcgagacagggagttgtggtacagttcaagctttcggaagtgcacagcgtttatacggataacgggattcccaatgaatcgaagaaacttctggaggaacaggggattcgggtatgcgttccggaagaaggaaattaagagtttttggcgcacggattatatggaaaacaggcaatgcaaacagtgacgataactgtctgcattgcctgtttttatgtgacggtccggactgtccgggctgacacccatttatatttctgcctgtccgtgctggtgaaccataaggctacatgcttacattcaggccggcatttttaaaaacattatagtattcagtcatatcttcggggcggagcgctttgacatcttttaactgatagggaacctgaagctcttcatactttttctcaccaaattggtggaagggaagcagattcaccgtatctaccctgtgttccttcagcagcttgacaaattcctttgcatcctggatggtgttgttgacagatggaatgacaggtatcctggcgacaaccggaactttcatggttacggcaaagtccaggttttcaaggattgactggttggacactccggtgtatttaatatgctccctgtcattatagtgcttgatgtccagcagaagcaagtctgtatttgcgaggaccttggaaaacaccagcggagtggagaaagctgtagtctccagcgcggtatggattccgttctctttacattttttcagaagggctgcggcgaaatcaggctgtacaaggacttctccgcccgacagagtgactcctcctttggattcctgatagaaatccatgtctttaagcacctcttccatgacctcatccagctccatcatatttcctacaaatgtcagcgcttttccgggacattgggtgatgcagcttttgcatccggtacagttatctgcactgaaaaccagattgttattttcaaaattcaggcagcctgcagggcatttcacctcacacagatgaccgtagaaacattttttcttgtcccatagtatctgggtagggcgatgctgcgactccgggttggaacaccaggggcatctcagaggacatcctttaaagaacacgaccgttctgattccggggccgtcatggatactgaatctctgaatattaaaaatatttgccttcataatcataagctcctataaaaaatgaaaggacgtctgaatcgtaatcattgcatactatatcacaacaggattcaaaagtaaataagtttcgtacgtaaataaaatattgacaaaatgaaataaaaggcgtacactgaaatcaataaaaatataaaaaatcggcaaaatgtctttgcaggatttgggatagcttaatttatcggcaaaatgtccgaagaaaacagcattgaggaaagcaccttctttcattcgaagaaaaaagcgccggaaaattaagaaaaaaagaatcgcaaagctttacatttcaaggttttgaggaggaaacagccatggaaaacaatcactttggaaagctgacggaacgtatgcataatttcagggaagaacttctgaatgcgaagccgtatgtctgcgcggagcgtgcagtacttacgacggaaagctaccgaatgcacgcggataagccggtggttctcaaaagggcctatatgctccggaatattttggaacatatgacaatttacattgagccgcagaccctgcttgcaggaaaccaggcgtctgccaaccgggcggctccgatatttccggaatatgcgatggactgggtgatggaggaactggaccggtttgagaaaagagacggggatgttttttacataacagaggagacaaaggaaaagctcagggagctggctccgtattgggaacataatacgacgaaggacaggggacttgcggcaatgccggagtcgagccggattttctatgacctcgggattattaaggcggaggggaatatcacttccggtgatgcacatttggccgtggaatatgaaaaggtcatgagactgggacttaaggattacgagaggcgcaccagggaagcgatggaacggctggagcttacggaggctgagaatttaaagaaattttatttttaccaggcgatcctgattgtcattgaggccgttagaaattttgcatcccgctattcagagcttgccctggcccaggcggccgggcttgagaagggggaacctgatgaaatgaggagggcggccgagcttcgggaaatggcacgcattctttcaaaggttccctatgaaccggcggaaagcttcgctgaggcgcttcagtccatgtggctgatccatcttgtgctgcaaattgaatccaatggccattccctctcctatggcagaatggatcaatatctttatccgttttacaagaaggatcttgaaagcggaaaagagacggaggaaagcgcctgcgagaaaatgacgaacctttggctgaaaaccttcacgattaacaaaatcaggagctggtcccacacccagttcagcgccggcagtccgctgtaccagaatgttacggtaggcggacagacggcggacaaaaaagacgcggtgaatccgatgacctggctgattttaaagagcgtggctcagacaaagctgccccagcccaatctgacggtccgttaccatgccggactcagcgctgaatttatgaacgaatgcatcgaagtggtgcgtctggggtttggcatgccagcctttaataatgatgagattattatcccctccttcattgaaaagggagtcaaggaggaagacgcgtataattacagtgcaatcggctgcgtagagacagcagtgccggggaaatggggataccgctgcaccggaatgagtttcctgaatttccccaaatccctgctgatagcaatgaatgacggcgtggatccggagtcgggagtgaaactgtgtgaaggcgcgggacatttcagggatatgacctgctatggagacgtggaacgtgcctgggataaaattatcaggaatttcacgaagcacagcgtaattatagagacctgctgtgatatggttctggaggagacagtgcccgacgtgctgtgttcctctctggtggaggactgtatcggaaggggaaagacactgaaagaaggcggagccgtctatgactttatcagcggcctccaggtaggaattgccaacatggctgattccctcgcagcaataaaaaaatgtgtttttgaggataaaagcatgactccggctgagctttgggacgccctgatgaataactttgaaggggagaaggggatctggattagaaatcttctgctggcagcacctaaatacggcaatgatgaggattatgtggattctcttatccgaagcgcttatgaggtatatatcgacgagataaagaaatatcataacaccagatacggcaggggccgataggaggcatctattatgccggaacctcgtccatttcggccaatgtgggccagggcatgggaacgctcgccacaccggacggcagaaaggcgaaagaacctctggcggagggctgctcaccgagccacgggatggacaggaaagggccgacggccgtatttaagacggttgctaaactgcccacaaaggaaattaccggcggagtcctgcttaaccagaaggtgacgccgcagcttctgtcaaaaccggaagacagacagaaactgaccatgctgctcagaacattttttaaccgtcttcacggctatcatgtccagtacaatgttgtctcaagagagacactgaaagcagcacagaaaaatcccgaggagtaccgcgacctgattgtccgggttgccggatattcggctttctttaatgcattgtcacgccagacacaggatgatattatagagaggacggaacagaatttttagaacggcagttttttaagagcaggaaacggaggacaggaagacatggagtttttatttgatacggccaatattcaggagatacagaaatacatcgccatttatcccattacaggagtgaccagcaacccttctattattaaaaaagaggggaagatagatttttatcgtcatttccggcaaatcagagcaataatcggagcggagcgttccctgcatatacagcttacggcgccggatgaaggcacgatgctcagggaagccgacacggttttaaataaggtggatgataaggtatttatcaaggtgccggttaacgaaaacggtctgaaggtgatgagagctttgaaaaaagacaggataggagtcactgctacggcagtctattcgaaaattcagggatatctggcgctggaggcaggagccgactttatcgcgccgtattataacaggatggagaatctggatattgatgcctatgacactatagcctgtctggcggagcaaatcagagcttacggatataatacaaaaatcctggcggccagctttaaaaatatcgcacaggtgaatgctgcttttgcagccggggcccagacggcgacgctttcgccgcagcttcttcacgaggcgatggggatggcggccatcggcaaggcggtggctgattttaagagtgactgggagagcgtgtttgacggtaaagacctgacacaattatagagtggtttttgatggaacgggggtggcgtgatgagatatcttgtaatcgatataggaggttctttcataaaatatgcgctgatggacgaagcatattatgtgatgatgacggatcagctccccaccccaaaagaggggcgcgatgagctggtggaggccctggggaagctgtatgacagatttgcgggtgagatagacggcatggctattgcggccccggggattatcgacagccggaaaggatacttttacacaggaggagcgcttcgatataacgaaggctttgccatgaaagaagctcttttaaagcggtgtccaacaaaaatccatattgagaatgacggaaaatgtgcggcaatggctgaggcggagctggggtgtctgtctgatgtggaaaacggagtagtcctcgtcctgggtacaatgattgggggcggaattattaaagacggaaaactatacaagggaagtcatttttcagcaggagaggtatcttttatctgcacggcggggacggaaaagccggattccgggaatatatggggaaaccgctgcggcggagtgtcgcttgtaaagagggtggctgagaaaaagaagctgccctgtgaagcgctggatgggaaacaggtgtttttgctggcgggagacggcgacaaggaagcactggaatgccttgacgaatatacgagagagcttgctatccagatttttaatctgcaaaacatcttggatccggagcggttcgccatcggcggcgggatcagcggacagcctcttctgatggagtatatcagaaaaaatctggatgaaatatacagtgaattcacctatatagtcagaagagccgaggtggtcacatgtcaatatttgaatgtgtccaatctgttgggggcgcttgtttgctacctgaaagaggaacaggagacggcgcattagagcgtgtctcaaaattcattcccgccaaatgtgccgcaaagtgtgccgcacatctgacggaaagcaattttcagccacgctccagttatttcctattcttttttcggtgtatttcccaaataactccaagaccgaaacagagaatacagacaacgacagaaacagcaatcaagggccagaagctggagcggtatgaaccttcgcccgtctctctgataaggcggttccggccgtctgccgcgccgctgctgtcaccggcaccggctaaggcggctgtttcatctgatatgttccggccggacgtactcttatcagccgtttcagactccgttccttcctgccgctcccacagcagttcccttttgacggagccgtcctcctgcagaatatttgccgaaaggctgtttgcgccggaaaaaaagaagtcgttgatactgccgccggaacggatgaatatctcccaggcagcagccgtgttggtcttctctttttcgggaagcagctcaagtgtctggggatcggtgccgctcaattcatagggcggccagaccagcttccagatttctcccttcttatccagggagagaagaacgaaatcacccttttccggcttttccctgccatggtaggaagtggtgtaggaatacagttctccctgatatccggtaaaatctgccgtcagttcaccgggtatttcgctgagcggaagcatcctgtctatcacgtttttttcagcgccttccgggccgcaggtgagtgcgtggtttaccgtaatctgatacaggttcccctctgtttctgttatggtaccgatgatcagtgcattctgctcgccgcgccacatgccccactcggcatcatgggccagggcggtcagaggagcggttcctgacagtagaaagcagagtgacaggaccgtaaaaaatcttgttatattctttctgttttgtttcttgataaaatatcccatatattcccatttcctttcctgcagccggttttgaaagtttattgtttgcgggaatggctaccggttaatctcggtaagccgtacaatgttctcaagaagccggtgaagcgattcctctgtttcaccatacttcttcaaatcttctaattggagcagttcttcggcatctgctgtggtgatactgacgccttcttttacatcgctgcctttagagggataatcccagcggatttcaccgcagtttccgatcagggcgaggaggctgcatgccgtctggctcatgcgtctcagatccggttcactttcgaaatgtaccgtcatggtatatggttctccggatgtttgaagttccaacgaccttttttcttctatgttgaaatactcggccagaaggcccagaagccgtccgtctgcggggacgtcgccgatatattcatttctggcattgaacaattcttcactgtacaaagggggcagactgtagacggcaaagacatgctccagggaagcaggttctcctttcttcacttttccgttccacacaatgcgcgccgtatcgccgggtaaaaaatccggaaccggattggcggaaagtacagactggtccagtctgatgacggatgcttttttcagtatctcttcatcctcaaacggcctggcagtgattccgtcctcggtaatctccgtgataacggcgttaaaagattcagttcctttttccgaacagccggctgcggacagcagcgctgtcaggcatatggcaaacagagcgacggttctcagaagcttcatacaatttcccctttctgttaaggcggctgtgcggcagcattgacggaaactgccgccggacaaccaccggtttgatacgtttattattattctaaactatttctctttctgttgctattacggctatcctaagaattcttacatttccattgcaggatttactcaagcttcatataaatttctctctggaaaatccgggtagtggagacggcgatggcctttggccttttcctgacgtatttcattttacttagtgcagataaaacccgtaaaagaactgaaatatccgttcttttacgggttttagtcgttaaatgtgcagaatagagagaagggaagtcagcatctctgatgggaagaattgagaatctggaggattacgacgtgccgcctctgggaatcgtttgtccggatccggtccggacagatatttaccggaaaaaatttggaagatataaggaatattatgacggctgtaaagccggagggaataagcagtgacaaatatttcgacaaatacgtcttaataattgacaagcctctcattttatattatacttagttcgtggttaaccatatacaaaagataacttacataagaaggtttaccaaagaaaaagtacgcagatacgaaggatttgtaacggaaagtacataagcgctttacgaagtacaaaagaatgtacacaaaagtacaaaagacggcatccacaaaagaacaacagaaatacaaaagaaacgacgacaaaagataacattttcaaaatacaaaagataaagcacaaaccaaataaatacaaatgaagagctgcttcactttgtatgatatagcaaacactatattggagcgaatgaaacccagcaaagaacaggaatacctgttttttgccgggttttttaattgaaggcggtgacctgcacgctccgcgcgaaggagaggggaaatggcatacagggaagaattgaaaaaccggatcaatgaatttattgagtctcagacagggaatatctgcgtatcgctgttcgatttaaaggaacaggacgggttttccatagacggggacaggcgtgtcccttcggccagcatgataaagctggttatcatggccgagctgatgcgccgtgtctgcgcaggggaattgtccctggaagaaaagataaaaattacgcaggaaatgagaaccggcggagacggagtccttaaggaactggagccgggccatgaattttcactgagagagatactgaccttgatgattatagtcagcgacaatgaggccacgaatattctgatacagatgctgggcatggacaggattaacaggatggcggcagaactgggactgaaggaagcggtattgggccggaagatgatggattcagaagcgaaaaaacagggccgtgataattttatctgtgccgatgatatcatgctgatcctgaaaaaaatttatgagggaagctgtgtggacaggaaagccagcgccctgatgctggatattctgaaacggcagcagcagtcgggacgccttcagctctatctgcctgaggacgtggaagtggcgcataagtgcggtgatttggattttctggaaaatgacgggggaatcatacttcttccgggacatccctatattctggccgtactgacaaatggggtgaaaaccaataaggacggaagagaggcaatcggcagaatttcacaaattatatatgaagagctttcgtggtaacagttcagccatgatgtattccgcgaggtgttttcgctgttttttgcgaaaatcccgagttgtgcggcgcgacgcgatgaaaagtgaacttttcaccacaatcaacggcgtttttaagccgaaggctgaaccgtaacctttcgtgatatgacagaaggtgtcctttcttgacagaaaaatattacctgccgtataataacaaataggagccgggcagttactttttacagccactgtcctgcgaggtgttttcgtgtgcaattgcacgaaaatcccgtgttacacggcgtgaaaccgcgtttttcagcggggctgtgatcagtaatgccggaaagtttccggcgtagatttcataggggggcagggatatgaatcagggagaaacggtatatattatcggcgagtccaggacgaatctggataatgcgattacgaaggtttacgggacattttatattgcgtttgagatcataccggagacggaagagattattgaggtagattgttcaaggactctggaacttaccaaggattttatccgaaggctgtttatcggcaaaaagttcgtaaccgatgcagagcaaattgaagctgaggttaaaagacgctactatggttcttccacgaaagcaatcattgtggcataccgcgatgcattgaaacgttttaagaaaattaaggaatcaaatacatgacaaatgaacagatacttacctgtgcgataaatatcggggaacagctcctgattaacggcgctgagatcagccgggtggaggatacgatcagccgcatatgcagcgcctacggcgtccgccagagccacattttctccatcgcctcatgtatcattgtttccctggaaacgtcagacggggagtggattacccagaccaggagaatattaaactacggcacgaatatgtataagctggacagacttaataatctgtccaggaaaatctgttcggaacatctgccccggcaggcgatcgaagaggaattcgatgcaattgtaaagagcaaagaatatccaccggctcttcagattgccgtctgtgcgatggtggcggcggcctttactgtttttttcgggggcacactgagggatggatttgccgccgcatttgtcggcgtactgctgaaactgaccttgtacggcctgcagtctatgaagatgaaacagatattctccaatatcatctgttccatcctgtcggggcttttatgtatctttgtctgttttgccggtcttggccggcatttggatacgattatgataggcaatatcatgctgctgataccgggggtgctgttgacaaactcgttccgtgattttatcagcggggatatgatcagcggcctgctgcatttttcagaggcgattataacagcggtctgtgtcgcaggaggctttattatagcaatcatcctgacgggaggttccttatgagagagttctgttatgcggtagccgcgtcctttttcggctcactcgggtttgcggttctctttaatacgaggggcaagagaatcctgatttccgccgttggaggcgccgtcttctggggctttatcttgtttttatccacttcgtggataatcaatacctgggattttttttatcggccattcttatcacaatttacgccgaggtatgggcgaggattttaaagacaccggcgacaaccgtgctgatgccgaccgtaattcctttcatcccgggcggggcgctttattatgcggtgagtgcggctctgagaatggatctgcctgtctttgctgagaaggcccggtcggctctggggctggccgtagcgctggccgcaggtatcatggtggtgacttcgctgcgcgggccggtggatttgatattgaggagatggaagcagggctcataaatttatagatttaaatcatgcacactttatgtaatgatacatagagcgtgcattttttatttaacaggaaagttttcctgttaaataaaaaccgctccgcggaggatcgcactgcgtcggcagggaatcatgtcgctacagcgacccgccgcagcacatcaaataaagtttgtcataatctgaggagtacgcagtgcggagcaatccggtatcaaaggggccaaaagaccttttgaccccaacatcatggcattaagttacaaggaggacaccgcatgaatcaaaaatcacataatcttaaaaatttaccagaaccggcatttgccggaactggcgattcctaataagggacttaatttatagccccttatttattgaaggatgtgcaaggacggtaaaacgcgaagaccgtgagcaataggaaacggcggcctgtgtagggagtgtccgggcttatcgcggattgacggtgaaggattcccctgaaacgcggcttttaaggtttcgaggtaaggagtcaaaatactggaattgtttttaggccagaccaggaaaccggattcgataggcgagtagcccgaatattcataaggtattttttcaagccggccgctttcgatataggaggaagcgatccgctcaggaaggaaacagacgccgaggccttccaaaagcagattcatgcacagatacccgtgaatcgtgtgaaacggatagattcgtggataaaaatacgtattgagccaattcgaaaatgccatcccccagtccatatcgatgtaaggaaaatcatccagcgtatcgggagagaaatagcgggagttcagtttcagagcaggtgacttaacaaggacatagccgcaattccatagctccacagtctctatcctacggtgggtgggacggttcagcacaaagccgatatcgatattgtcgtccagaatcccgtctacgatatcgttggaatgcagaacattcacgttgaatgagatgttgggatatttttctatgagcgtacggaattttgagaagaccgtagactgccagatggtttccggagccgcgattgacagacgggacgtgaatctgccggatacatcgagggctttttttgattccagatccagattgcagatgctctttgcatagtggataaatatttttccatggggagtcagttccacagaggttttgttgcgcacgaagagggtcttgttgagttccgcttcaatcgatttaatccgcgccgtgacggcagattgtgatacgaacatgatttcggctgtccggctgaaattttttgtgttggctaataataaaaatgtcttcaatgtttcggtatccatatattcctcccggcactttgtaattcttattaaatttctgattcacactgaaagataatttgtatttctcaaatggattattttttattatactatacaaagatgcaattgacaaatatattgcgtaaagtgtaaaaaaacatctgacaattaaggcgcagtacacagacagtattacgggggttttaaaggggagagtggtgttggatcgaattaaaggcatgaaaaaggctgatgcaaagcgtttattattttttcatgcgtttttctgggctttttctaatctcattaatcccataacaccggcgatgtttctggaactgggccttcccgattatatgtttggggtgagttttgcggcaatggccggggcctccttttttatggctcccgtttggggaaggctgtgcgggaaaatcggctgtacgaaagtgatttttattggatttgtcacctatgcagttacacagattgcgttttactattcggttacgcaggcagagatcatcatatgccgtctggccggcggaattacctgttctgccgttccggtagccacactggccggcctgatcaatcttaccggagccgaggaacggagccggggtatgctttactattcggttttgtcaacggcgggctgtgcggttggatattcgataggaggttttttgggcagcatatctattgaactggctttccagattcaggtcgtggcgatattcctgtttgccctcatacttttattgactgttaaggatccggagtctgcctgggaggaaaggagcttgccggaccaaaagaagagcggatccaatattacggtattgctggccgtgttcatggcctccgtattttgtgccagctttgccacgactgcgtatgacaacgcatataactattatgtcaaggaggcgcttaaattccccaattattacaatggcctgattcgggccgggatagggggcattacactcattgtggattttacagtgggagcctggctgatgaagaagacggaggtcaagcgctcgattatcgcctgtctttttataaacggcgtcgtggcggtaacggttccgcttgtatcggatgtcccggcttttgtggttggcaactttatattttatgcggttaatgcgctgtacctgcctcttcagcagacaatggcgacggaggacagcaataaggaaaacagcggcagtgttgccggtatgtttaattcctgccagtatgcgggaaaggtgttcggggctttatttgccggttttatatacggagcaggcagcttgctgccgttctattcttcgggaatcgtgtttatattaggagcgggatgttccgtcctctataaccgaatgaaaaaaggagagctgaaatctgggcaaagggggataaaggaagacggcagattttattataaattaacaaaataaacaggaggaggttttttatgagtgaaaaaaagaaaaagttaaagttgaaggctccgaacgcaatgctgatcctggtaattatcgtactggccagtgcaattgccagctacgtagttccggccggcttgtatgacagagtggcagatcctgctacgggacgaatgctggttaatcctgacaccttccattacattgaccagacgcctattggattttttgagttttttgaatcattgacgattggattgcaaaattccggatatattattttcttcctcttaatcatcggaggggtatttggaattatggatgcgacaggagcgcttcatgtgggaatggcgaacctgattaagaaaatggcgggaaaagagattctgcttgtgccgatttgcatggtggtattcggcctcggctcggcctgcgcagggaactttgaagaattcctggccttctttccactaatggtcaccgtctgccttgccatgggatttgactcgatgacggccatgggtattgtatggatggcggcggcctgcggctattccggcggatttaccaacgcctttacagtcggagtggcacagggaattgcgggactgcccctgttttcggggatgtggctgaggatagccgcttttgttgccttcctctccgttagtattgtttatgtaacgatgcacgcgataaaggtccgaaaaaatccggagtccagtccggtttatgaggaagataaaacccatgttgttaatattgatgtttataatgtgccgaagctgacgatacggcataagctggtgcttttgattttagtaggcagcgtagtggctcttatagtcggagttactcagtttggcttttatatcgacgagctttccgctgtttttctgattgccggagttttagccggaatcgtgggaggacttaagccgggtgaaatgacggatgaatttatcaaaggctgcggaaaccttttgtgggcgggaatggcaatcggactttgcggcgcggcgacttatattcttcaaagcacaaatattattgatacggttatccactttatgtcgggacttttgcaggggctgcctgcagcgctcagcgcctgcggtatgttcgttgtccagaatattttaaacatcctgataccctccggctccggtcaggcggcggttacgatgccgattatggccccgctttccgatgtgctgggagtgacaaggcagacggcggttctggcattccagttcggagattcatttacaaacgtagtcacccctacctgtgcaactctgatggcagctttatcaatggccaaggtcccctgggggaaatggatcaagttcctggctccgctttacgcagtgtgggtagtgataacctttgcgttcctaatttttgcggtaaaggttggatacggaccgttttagtaagcagcagggcgtaaatttaagaaattaagaaagggtagtgataataaatgaaaagagatatcttgagtgaagctcttgagataaaagaggagctgattttatggagacgcagtcttcaccggattccggaggttggactgatattgccggaaaccttccgctttgtgacggaacaactcgaacggatgggtattacatataagacatatacgggtcactccggtattgtggcggattttggcaacgggcagggcaaaacagtcgccataaggggcgatatggacggacttccgattgaggaggacacaggtcttgaattcagctcggaaaataagaatatgcatgcctgcggccacgatgcccatacggcaattttgctggcggccgcaaaattattaaaacgccacgaaagtgagataaacgggacggtcagactgttgttccagccaggagaggaatggccgggcggcgcggaaccaatggtaaaggacggggttatggagaatccgaaagtggactatatgcttgccttgcatacaacgagaaagacagaggagccttatcagaacggagccgttattatcagcaataaatacgtatctgcatccgacgaacaaatctatgtgacggtcaaagggagaggcggacatggatgtgctcctgacgagtgtattgatccgattgcggcggccgtgctgattatcaataaccttcaatatattgtcagtagagaggtgtctcccctcaattccagtgtaatcacgattgcaaccgtcagggcggggaacgggaccagtaatattatacccgatgaggcggaatttataggcaccgtgcgaaacgtggatatggaatccagaaattttgtcatgaaacggattgaggagattatagaccacacggcaaaggctatgagagctgattacacattcaggattgatcagccctatccgcctctttcaaatgacgcaacggtctcggagcatgtgagaaaagcggcaaaaaagatagcgggggaagaacgtgtacggtcgattaacaaaccggaaatgggaggtgaggactgtgcctttttcttccagaaagcgccggggtgttatttctaccttcagactgcgatggcaaacccgcgggacggggaatattatccggctcataatgcacggtactgtgtggacgattcggtattatatatcggggcagggacttttgtggaggctgctatgagtcttttggaggaatagtaaagagatttagttaagcaggtgaggacgccgccggtacggccagcggacggggtggtgaggtgtgtatatgagtctttcgtcccgggggtttggcatcgctggatggagaaggagatactgtggttttgttttcgcagggcggagccggagagaatgatatccggctggactgcttcttcgagggatagctctaagacagaggaaggcaaagccccggggttacggacaaattcgctccgaactccgaatgagttcgaagctcaagttgtcccggattttgcccttgtagggctaaaatccgcccggcgcgctttgtctccctctgcctaagagctatcatctctcgggcgaacgtccttccggatatcattctctccttctccgccggaagatgtcggcagtatctccttctcccggaaggttttcgccggaacgaaagactccgccgggggtatcggccccgtcctctggcctgcggccgctgagtgtctcacgcgttaagtgcgggggcggaccttgtcgcggccactcagtgctaccatgtacaggaaatacgatataccatcaatggactttaaaaaaaattgcggaagattttgatatcggcctaccgtaaatacgtagtggccgcgacagggccctccccatttaaggttggagacaatcagcgtccggaacggaccatgtccggtgtcgaaaacctccgcctgagtgttccgtccccggtgaaaaactgacccggggaagtaggcggaatcaattgcggaggggacatgggagtccgccggtgcttagcgaggtcttttcgagcttagcactccgatgcgcactccaaagagtgcaaacggtccccgcagcaattcattccggccggattccccctcacgaccaccttcaaccggggacggaagactcagccatccccctcaccacaccggacatggtccgttccggacgcgtcctccaacctcagttaaatctccattatctatttcataacattctgaacatcacccgcagcccatttagccacattatcaaatacaatcacagcacgttttacaagcgcttcttttgtggcaaaagcgatatggggagttgcgattacatttttggcgttcagcagcggatgctcctttttaatcggcggttctgtttcgaatacatcaatggcggccccggcgatggcgccgctgttcagggcatttgcaagcgcatcgctgtccaccacagggccgcgggccgtattgatgaggatggcgcttttcttcatcattgaaagctctttttttccaatcagtccctttgtctccggggtcagaggcgtatggagggagacgatatcgcagacggagagaagctcatccagaggaacataggtaactccttctatctccttaaccgttctgctgtaagcgtatacttcacacccgaaagcccgggcaatctttgccgtgcgcagtccgatggccccggtgcccacaatgccgaattttttgccctccagttcaaaaccaaccaggccgtcttttgtcccttcgttcctgacggctgcattgcaggggatgatatttctgtacagggagataaccatgccaaatacgaggtcagccacggcgacagtggaatatcctgcgcagttgcagacggttacgccgtttttccggcatgtatccatggcgatgtgatccacgccggtgaaggcaacggagagaagcttcaggtttttgcagccctcgattacttcgctgttcatgggaaggttggagacaacaatgatgtcggcatcttttccgcgctcaatcagctcctttgttccggttacacgggtgtcgtagtatacggtttccagatcctcaggaagcgcctcctgcgccattgacagcagtttttcctgttctactcccagcggttcgataatgacaagtttcatgatttttaaatctcctttcatatttcatgggcggcagcttttatgattgtgcggagtaaaacgtcggctccgtcactgatctgccggtaatcagtccattcttccgggcagtggcttcttccgcctttgcttggaacaaatatcatggccagcggacacatgtttttaaagttcatcgtatcgtgaccggcgccggacaacagatgcatcgaggacagtgaaagttcatcggccgcatcttcaattatctttttcagacgcatatccatggcggcagggtctgcctgtaatgtcctgctgatttcaaatgataaatcggggcagtgttccgtactttcccggagcgtttcccggaaggcctccataaccgttcggattgaccggatgtcggagcttctgcaatcggcggtgaaggtaacctgcgacggaactacattggcggatttcggtgaggaatccatacagccaaaggtaatcaccgtcccgtcgccgcaggcggccgccctgccggttgccgccgcaatcgcttttgccgcggccagcagggcgtctgcacgcatatctatcggtgtcgtaccggcgtgatcggcccgtcctctgaccaggacgtcatagcattccaggctgacaattgcatcgacgataccgatatctttctgattctgttcaaggacggggccctgttcaatatgcagttcaataaaagcggcgatatcctccggctttttccgggcgctttctatctcatcgggatttaagccgtaatccttcagcgcctgatataatgtgattttatcggcgtcttttatttcttttaactcatccggggtgacgccgcagcagatggcccggcttccgaacagtccgcctccgaaccgggtgccctcctcctccggcatggcgatgaaatcaatgggataatagggggtgatatgattctcactcattacccgggcagcttcaagagcagcgcaaactccggcttgcccgtcaaaatttccgccgtggaaaacggtgtcaaaatggctgccggtcatgacagccggtctttccaccttcccgggatacctgccgatgatatttccggccggatcttcatgcaccttcagccccgcctccgccatcctctgcttgagataatcacgggcgtcggaaaattcttttgtgtaggaaagcctggtgcagccgctgccgggagttaaattaaatctggatagtgattccaaatcctgttgaatacgttctgttttgcatctcatggttgtctcaccgcggcaggggctataccagagccgctgccttaacctttcataagctgtgccggatctgcggtgaacgcagaaaccgtttatgcgcgggtataataaccgtcatgcggtcattataccataaatttttcatggtatgatatgaatgttaacaaaattgtaaagtaaataattgagatagctgtagcttatttgaacaaaattctataaaatgataattagctgatatgacaaacggaggttacccgggcgggtgtatttgtccgccagactgctttggcagcaggctgtgtcagtgataatctgattgaggttttacaggatgagtaaggcagggagggatgcggatgagttatgatttaatggtttttgaaaaaagtaaggctccggaggggagaaggacttcctgagctggtaccgggagcagacagagcaggtggagaagatttggttgactgggcggatatggaattataaatgatttggcccgagggagagagggcggttgaaatagaagctgctgaatcaggaggtgttttatggaatacaggcgtgcaaaccgaggcgatatagagcgttttgttgaaaaccgggtggaatttgctgcttccatcagacaaatcgatgagctggaattattcaggaagaggacgcgggattatgtggaagaacatatggaaaaggaagatatggttatttttattgcagttgaaggggatagaatcatttcctcctgtatggcctgcattttccatacggctccgctcccgagctgtccgaccggagtctgcgccgagctgctgaatgtttatacggtgcaggggtaccgaaggcgcgggcatgcagaaaaactggtacggatgctgattaaggaagcgggccggctgggtgttggaaagctcctgctcgacgccacgcagatggggcgtcccctgtatgaaaagctgggatttgtgccgttaagtgatcaaatgcagttgaaattgcaggggattatttatagataccggagcatgcagaagcggccaatgagaaaacaggaaacgtaacaacggtaaatcaggaaacaggaacagatggaaacaaggagattagatgaaaataaaaggtaatattgatgaaattccggcagaatttatctggtcggataaggcaggattaatgacgaaggaactgggaaagtatgccggaagtgaaaaaatatatgcgaatctggacagcattcctcccaaggcgttcagcacgaaatatcacagtcattcccagcaggaagagtttttttacgtattgtcgggaagcgggacactgcggctgaatgacagggagcaggaagtgacggcaggagattttatagccaaaccgggagggaaaatgcttgcccatactttctataactccggaacggagcctatgttgattttggatatcgggacggttgaaaaagaggatacctgctattacccggatgaggatgtttatttacacaaatcaaatggagacagccgtgctttcagcggcgatatactgctgacggagtggacttcagagcctaatcaataaagaaacaggaagaaaagggatgaaataacatgctggaatataaaaatgcttcggaagagtttgcaccgcagataacgaaactggtgcaggagacgattgcttcggtatatccgaaatactatccgaaagaggtggtggatttttttgccggactgcactgtgaagatgcagtccgaaaagacatcaggaacggaaatataagaatgcttttagtggagggatgtctagcaggaaccgggagcagggaaggtgaccatatcacaagagtctacgtttctccgtcttttcagggaaaggggtatggcacatatataataaagaagctggaggaagaaattttttcggattacggcagaatttatctggatgcatcgcttccggcttgtcatttatatgaaacgctgggatataaaacatcttatcatgataaatgggaggttgaaaacggcgtgatactggtctatgaggttatggaaaagataaggccggaggatatcgggcaggagcggccaaaaaaggttttggaggaacagagtgacagcgggaagacagaaatctttgctgccgatgttcgggatgaggcactgataaaccgtctgactcaggtatggagaaagtcggtgaaggcaacccatttattcctgtccgacgaagaggtggaacaaattgcggtatacgtaccggaggcattaaaagagatcccgcatctgctggtcgcggcggccccggatggctttccggcggcattcatgggaatcggcggcagtaagctggagatgctgtttattctaccggagcagagggggaaaggtctgggaagccggatgctccggtatggaatcagacgatacgggattgatgaagtctgtgtaaatgagcagaatccgcaggcaatgggcttttatgaacatgaagggttcagggtatataaaagaacggagacggatgaacaggggaatccttatccgcttttatatatgaagctggcacagcagaccgggaacagggagatttgacatattcccgggcagatattagaatagaagaaaactgttttgaaccgaagggggaggtaaaccgcaggtctaccgggctaaactgccggtcggttgaatggttcacgggaaaatgttacgatgcagtcatcaaaataaatggaggatgattttatgaggaaccggacatttggaatgctgattgcggaatatagaaaagaaaagggaatgacacaattggagctggccgaaaaaatgggggttacggataaggccgtttcaaagtgggaacgggatttgtcatatccggatgtcaattcactgccaaaactggcgggaatatttgggatatcggtggatcagctgatgcagattaagacgaatgacgggccggtgaacgacagaccggttgctaaccggattatcccgatcgtcttcaaagctctttctctggcaatgggaattgctgtggcggttttgtcggttatgaaggcgatagacatgtattcgggcttctttatgctgggactcggccttgcatgtgcgggaatctctcttctttcagaaaaaaaacgtgacgattgacccgttttaattcatccggtaaaaacaggaagcaaatggggagggcaaacaaaatgaagcaggagcaggaaaattattcagaaaacgaggcatactggaataagcgatcggagatattcgatactcagattttaacgacatatgaggaagcctacaggaaaacaattgattacaccaagaaatacctgaaggacagcgacaaggctcttgatatcggctgcgggaccggtgtgactacgatagaactggccggcagcgtagcggagatgacggcggtggataccgcgccggagatgctccgccaggcgagggaaaaagcaaagaaggccgaagccggtaatatcgatttcatccagggcgatatgtttatggaagaactaaagccgggtacgtacgatgcggttatgatttttaatgtgcttttatatatgccggatcaggctgcggcaatgaagcgactgcaggagcttgtaaagccgggcggttatatttttgtggcagccgactgcctgaaacacagctttacaaaggaagctttgcgtaaatggtatagaagccgcaccggaaagatgccctttgtagagttttacacgccggagagtctggaacagatgattgagaacgggggatttgagataatggagcgggaggcgctgtttgaacgccccgtcaactattttctggccgccaggaaaaaggttacagttcagccttcggctaaaccgtaacaaatgatgcacagaaacggcaaaaaaacgccgactttcgggagataaaagccgccggaagaatggcagaagatgataaaaatataatggttaaaaacgaaaaaggcagttatcatcataacttcctgccagggagttcctgtcagagggaagcggcgggacagagatggtaactgctttttggtttcatacttaaaatccggtttaaatgaatgattctgcataatattgggaagaatccatgtagctgttttgatgggcttatccggaaagaggaggctgcttacgccgcttcacccgcaatccacgcgggcatatctgaaaaaacaccataaatacgccgaaaaagcagtttttttttacattttatgccttgacacaaattgacaaactgtatataataagtaggcgtgtaaaaatgcgagtgtatttttgtgcgtaaaaataagagcttaaaaagcaaccacagacaatatcacaggaggtgaaaaggatgccaacattcaaccagttagtaagaaaaggaagacagacatctgagaagaaatctacagcaccggctctgcagaaaggatacaactctttacagaagagagctaccaacatttctgcaccacagaagagaggtgtgtgtacagccgttaagactgctacaccaaagaaacctaactcagctctgagaaagatcgccagagtacgtctttccaacggaatcgaagtaacaagctacatcccaggtgagggacataacttacaggagcatagcgttgttctgatccgtggcggccgtgttaaagacttaccaggtacaagataccacatcatcagaggtactcttgatacagcaggcgttgctaacagaagacaggcccgttccaaatacggcgctaagagaccgaaagacaaaaagtaattaaaacaaaatttaggtagaattcatttgaattgttgtgccggactttgatattgaccctgtaggttgcaggtaatcatagaaccgagcgcgaacgcattctatgagtgaggaagcatcactaagcatttaatgcgagtacctaagatctaatgagaagcttcggcccaatttccggagctggagcagatattaaggagggaagtaacgtgccacgtaaaggacatactcagaaaagagacgtattagcagatccgctttacaataacaaggttgttaccaagctgattaacaacatcatgttagacggtaaaaagggtgttgcccagaaaattgtatacggtgcatttgaccgtatcgcagctgagacaggcaaagacgctgtagaagtattcgaagaggctatgaacaacatcatgcctgttctggaagttaaggcaaaacgtatcggcggtgccacatatcaggttccgatcgaggttaagccggagagaagacaggctctcgctcttcgctggatcactctttactcccgtaagagaggcgagaagacacaggaagaaagacttgctaaagaacttcttgatgcatccaacaatacaggtgcagccgtgaagaagaaagaagacatgcataagatggcagaggctaataaggcatttgctcattacagattctaataggaggaaaaagctttggctggaagagaatatccgttagagagaaccagaaatattggtatcatggctcatattgatgccggtaagacaacaaccacggagcgtattctgtattacaccggtgtaaactataagattggtgatactcatgaaggtacggctaccatggactggatggctcaggagcaggagagaggtatcacaattacttcagctgctacgacctgccactggactctgcaggaacagtgtaaaccgaaaccaggcgcactggagcatcgtattaacattattgatactccaggacacgttgactttactgtagaggttgagcgttccctgcgtgtactggatggtgcggtcggcgtgttctgtgctaagggtggtgtggaacctcagtccgagaacgtatggcgtcaggctgacacctacaacgtaccacgtatggcattcatcaacaagatggatatcctgggcgctaacttctatggaaccgtagagcagattaagacaagacttggcaagaacgccatttgcttacagcttccgattggtaaggaagatgagtttaaaggaatcatcgacctgttcgagatgaaagcctacatctacaacgatgacaagggcgaagatatctccgttaccgatatcccggaagacatgcaggatgacgcagaactgtaccgtacagagctggtagagaaaatctgcgagcttgacgatgaattaatgatgcagtatctggaaggtgaagaaccaagcgtagatgagcttaagaaagcattgagaaaagctacctgcgaatgccaggctatcccggtttgctgtggtacggcttacagaaataagggcgttcagaaattacttgatgcagttatcgagtttatgccttccccgttagatatccctgcaattgagggtactgatccggatggcaacgaagttgtgagacattcttccgatgaagacccgttctccgcactcgtattcaagattatgacggacccgttcgtaggtaagctggcatacttccgtgtatattcaggaagcatcaactccggttcctacgtactgaatgcaacaaaaggtaagaaagagcgtgtgggacgtatcctgcagatgcatgcgaacaaacgtcaggaattagacaaagtttactccggcgatatcgctgcagctatcggattcaagttctccacgacaggtgatacaatctgtgacgatcagcaccctgtaatcctggaatccatggtattcccggagccggttatcgatatcgctattgagccgaagacaaaagcaggacaggataagatgggcgaggcccttgcaaaacttgcagaggaagatcctactttccgtgcttacacagacaaagagacaggacagacgattatcgcaggtatgggcgagctccatcttgaaatcatcgttgaccgtctgcttcgcgagttccatgtggaagctaacgtaggcgctcctcaggtagcatacaaggagacatttacaaaggcagtagacgtagacagcaagtatgcaaaacagtccggcggacgtggtcagtacggacactgtaaggtacactttgagccaatggatgccaacggtgaagagacattcaagttcgaatccactgttgtcggcggcgctattccgaaggaatatatcccggcagtaggcgaaggtatcaaagaggctaccaaagcaggtatccttggcggattcccggtactgggcgttaaagctaccgtatacgacggttcctaccatgaggttgactcctctgagatggcgttccacatcgctggttccatggctttcaaagaggctatgcacaaagcaggcgctattcttgtagagccaatcatgaaggtagaagtaacaatgccggaagattatatgggtgatgttatcggtgatatcaactcccgtcgtggccgtatcgaaggtatggaagatatcggcggcggaaagcttgtaagagcttacgttccgttatccgagatgttcggctactccacagacttacgttccaagacacagggacgcggtaactactccatgttctttgagaaatacgagcaggttccgaagagtgttcaggaaaaagtgcttgctacaaaagcagaaaagtaattgaaaacaaatcgttttaaactttccaggcagtgcaaaaactgcccggaaagtaaataataggcttgaaaaacatgctctgatagaatataattagagacagcctaacataaattatgaagccccctgatgggcgcaaattaaggaggacgttataaaatggcaaaagcaaagtttgaaagaaacaaaccgcattgtaacattggtaccatcggacacgttgaccatggtaaaacaacattaacagctgctatcacaaaaactcttcatgagagattaggtactggtgaggctgttgcattcgagaacattgataaagctccagaagagagagagcgtggaatcacaatttctacagctcacgttgagtatgagacagagaacagacactacgcacacgttgactgcccaggccatgctgactatgtaaagaacatgatcactggtgctgcacagatggacggcgctattcttgtagtagctgctacagatggtgttatggctcagacaagagagcatatccttctttcccgtcaggtaggcgtaccttacatcgtagtattcatgaacaagtgtgatatggttgatgatccggagcttcttgaattagtagagatggaaatccgtgagcttcttacagagtacgaattcccgggcgatgacacaccagttatccagggttccgcattaaaagctcttgaagatcctaagagcgagtggggcgacaaagttcttgaacttatggctgcagttgacagctatgttccggacccagttcgtgagacagacaaacctttccttatgcctgtagaggacgtattctccatcacaggccgtggtacagttgctacaggccgtgtagagcgtggtacacttcatgtatctgatgaagttgaaatcatcggtatctctgaagaggttcgtaaagtagttgtaactggtatcgagatgttccgtaaactccttgatgaggctcaggctggtgataacatcggtgctcttcttcgtggtgttcagagaacagagatccagagaggtcagtgtctcgttaaaccaggttctgtaaaatgccataagaaatttacagctcaggtttacgttctgacaaaagacgagggtggccgtcatacaccattcttcaacaactatcgtccacagttctacttcagaacaacagacgttacaggcgtttgtgatttaccagaaggcgtagagatgtgtatgcctggcgacaacatcgagatgacagttgaactgatccatccagtagctatggagcagggacttcgtttcgctattcgtgaaggcggacgtacagtaggttcaggtagagtagtttctatcatcgagtaatcgactatgatccaagagtgtctccgtatccgcttcgcggacagggagatgctgcggagtaaatttatatagtaccctcagggtacattgtgtccaagcgtaagataacccggaaaactttttgttttccgggtttttctgtgtgccgatgagcgataataagtccgtgctgcatgactgttatattacagttcgtcagagtccgttgggcggcctgttcaccgagaatttctcaacactgcgcgctttcagggccagagacacctgctcaatgaatttataatggctattctccatgcccagcaggctttttgccttgttaatccggaaacggattgtattttcatgctgtttgagcaggatagccgtttttttataatcaccgtcacaggtgagataagtttctatcgtcttaatcaaatcaacgctgtaccgtttttcgtactggatcaggggagccagagtcattgtataaaagtttttaagagcagcgttatcgtggacggccatcagcagattatagatgtgcagatcgtcaggataagtccactgctgtttcagcataatgccgatcctgagggaggagcaggcctggcggatactctgctgaaagtcggcagcgttttcaaatgctccgctgatgcctgacgagtaggtgttgcaataataatggaacagctttctgagtccggggagcgctgcgtcaaattcagcccgttcctgatagttgaaaatgataaaaccgccgttctggtaacgccgcaggcggagctggtactgcaccttcaaatcagattgcaggctgtagaattgacggttatcaagtcccggcaggttcagacagatagtgatatactcttttttgaaaagagggttaatatattttccgatttccagtatttcagaagtggaaagcgtctcatagagaaggcggttcagcttattttcaaagaacagctccgactgctcggtcatcagtaattctgatatatcacggattaaatcaccgtaaggaacattgctgtcaatcttgataacaggataattatgcttatccgtcaattccagaatatgttttggaagttccggcagatattcattcgtaacgagacagcaggagcttccgcttgttacgtagaaataaaaagtgtcatataattctttttcgtcatccttcacccagtacagacttctgatgtaaagatcacctttcagtgccagagtgtactccaaatcattgaactgaatggggcagtctgtaaaatttactcttgttacttccctgtctaatccattttttcccgatataatttcagagtctcttaaaagatttaattccataatgtcacggaccgtaatactcattgaaatccctccccggtttcggcagtttatgcgcggtataatgaccgctttgcagtcattataccatgttccacagggaacatggtatctccgacggaaattagagccggatttctgcgcggtattgtaattattacaatgatcgtccggtttattttgtactgtactataatgaagcgataaaggacgactgatataattacactatccggctaactgttgggcagtagttgtttttcgggaaaacggatacctgtggctttgatataggataaggggttagattaaaagaaggaggagaaaatcatgagaaggctggattaccaggaggtcagcgatatactgacaggatgcacaatccttgggacaggaggggcggttcgcttcagagcgggcttgcggctgttgaaaaagaatttggggagggaaaagagtttaaactgctggagtttcatgagattcaggatgaggcctggtttaccaatccttatttctgcggttccatcatgccggaaggacaggaggtacagattacggggaggaaattccgtcggccgtaagggcgctcgaggagcatatgggcgtcgcctttgacggacttgtttctattgaatacggcggaggcaataccggcgaggcgatggctgcggccgcacatcttggaaaatatatggtggacgcggacgcggcggggcgggctgtcccggagcttcagttttctacctactatgtgatggaacagccgatcacgcctttttccgtaactacacagtacggcgatgtggtgattgttaaaaaggttgacagcgatgcccgcgcggaggctttatcgcgttttatggcagttggctccgataacctggtgggaatggcggatcatccaatccagggaaggaacttaaaaaaggcggttgtcccgtcggcgctcacctatgcggagcaggtgggaaaagccagaagacaggcctgtgcggaggggagagatcccatatctgcaatccttaaggccgcagagggaagactgctgtttgaagggattgtgacaagtgatacgaactgggaaatcaaggacggctttacgctgggaaacatctttcttcagggcagtggtgattataaaaactcggtcggaagagtttggtataagaatgaaaatatgatattctggatagatgaagaggtgaagctgacctgtccggatttgatctgcatagtggagagaaagaccggcatgcctgtgacaaaccccaactgtacggagggaatggagctttgtgtactgggatttaagtgtcatgagctgtggaggacgaagcgggggcttgagattctgaatccggaattctttggctttgacatggaatgccgttttttggacggccaggagggaggaaatgcagatgggtgaaaagaatcgggaaaattcgttatcagagatattcaatgactatgaaaaaactccggtgccccaaaagccaggcagacctggtttgagcagggcatggtctggctcggctccggcttcggcctgagcggcctggcgacgggcggccttcttgccaacggcctgtcgtttaaagagatgctgctggtcagtgtgctggggtcgttaattatcacgcttcttgggatgctgaatgccatcgtgagtacgcatctccatttatccacgtcatttacagccagaaggccgttcggacgccagggagcgaagataatcggcattatcctgtgcttttccaactttggctggtacgcattccaggcggatctgttcggcaatacggtttcctctattataagagaagtgaggggaactgcgatcaatcccgttatttttacgattatcggcggactggccatgtccctcaccgccattatgggttttaaagctattaaaaaactcagcgagatcggacttccgcttttattcgtcctgtgtatcgtggcagtgtggaaaacagccggtatcattccgatgagcagtatattggaggccgggcctgtaggagaaccgatcacaattccgatgggaatctctatcgtggtgggaagctttgcggtggggattgcgatgataggcgatttcagccgtttttctaccacgaagaaggactgtgccatcggagtcagcatcggccatttctggggctatatcccggtactgatgtgcggagcattctttaactatgctttccacaactggaatattgtggagataatgatagagtccctgggacttggctttttcggagccgtcgtcctgattatcggccagtggaccaccaatgacaacaacctgtatacgagtgtactgggactgatgaatacactggacggtgtggtgaaaatctcccgcatgaagctgacctttattgtcggtattatcagcacaatgattgccggactcggcgtgtataaatactttgtgaactttttaagcctgcttggtgtattcatcgcgccaatcacgggtatcctgattgccgatttctatctgtgcaacagaaagagctatgacaaagagggcgacggcggcgtggagggatgtaaatacggcgctctggcttcatgggctattgcctcttttgtgggaattacaatgactgcaaaaccggtgggactgggctggtttacctccttcggtgacatcgttccgaccccgattgtatgcattatcgttgccgttctctgttattgtacggcagaaaaaatttccgtaaagcaaagcgtggcggcgccggaggtatcggcggcggaagaataggtaagtgaagaaaatgtaagaaaacatcaaatattgtaaggactttccattttcctgatgtgataaaataatattaggaaatcagcggacagtttatctgccaggggcagaagcttcattgccccggaggcggaagggaggtctttgcatgggattggtgaaagaatacgatacatatccgataccgtacagcctggttgagacagaacggctggaacgttttttcgaacagaaggcggcggaggggcatctgattaagaatctttgttttggttacggcagaggaagctttcagcaggtgatgatggggaagtatcaattttctatcggcatatttgacagagaggtgacgaaggaggtggagcgttcggagcgttttctggagttccggcagcgatgggaagaaaacggatgggaatataatgctccgctgaaaaatcttgttactttttacagtaaaggggacgtccgtccgcctgtgccctatacggtatattcccctgccgtccggatgggccttatgaagtgacggtgaaagaggaaaataaggcgctgctcaccatggctgcatttaatttgcttcttgcgattccctatttccttatttttcgtttaagatcaccgggaatcagtaaatatttcggcatatgggaaaacctggcctgcctgtttttttcacttttactttactggatttggcttactgcaggcctgagtattaaattaagacagaagagggcgctgcgctataaagaagagacgggaagtatccctgactttatcctgttttgggacgagcctgcgctgaatgccgcaggctgtctgccgtttgccgttccaatgctgatatgcggggtgagggaactggcgcaggtgtccagcctgctttcagtcctggcggttctgagcgccctgttgattctggtatttttatacagggattacagaaaaggcgtcgtcagatacagaggactgaagcggagcgcggttctcctcccggcccttctgattatagccgccttttacctgtatccgtataaaaatgattaccgtttccagaccaaagactcagagtggaattatgaagagccgtcggtaaaaaatcctgtttttctcctggggatgagtcccgctgatctgggctggggaacgacagaacacagcttttatatcgaaccgtccaatctcgcctgtaaatcggagctcatcatttacaatgagggaaaagcaggagcaccggttaacagccgaacgccggaatatgcaaaaagactgagatatatcggaaccgtgagagccgaactgagaaatgaaaaatatctggaccgctatctggctcagaaagagatttccctggacggcagcattctgctggacacgggcggtgaaatgaagtattatcttactcagacagggaaagagattgtcgggctgagagggacagatatcgttatttactttctcaacagttacgatgagcgtactttttccccggacgacagcaggcttctggcaaagataaattggctggaacagcagaaataatagtgggatgaggtggatgagatagaaatcagggttctaatggataacaatacatatatcgatcagtattatctgggagagccggcggtgagttattatatagaagcggacggctgccggattctctttgacacgggatattcccaggcatttataacgaatgccgggcagatgggaatcccgcttgaggagataacgcacctcgtcttctctcacggacacaatgatcatacaagaggattttactggctggaaaaacaagctgacttaaagaaggtggagattatcgcccatccggagtgctttaatccgaagcttgatgacagcggcctggagataggctcaccgcttcgggaagataaggtgaaaaaagcagggagatacagaccctccgggatgccgtaccggataagtgataagtgtatatttttaggtgagattccggcgcgcaatgattttgaaatcaggagttccatcggaacacagaagatacggagtaaatgggaacgcgattatgtgatggatgattcggccttggcgctcaagacggaagaggggctgttcatcgtgaccggctgttcccacagcggaatctgcaatatcgtggaatatgcgatggaggtctgcggcgagaggcgcattgccggtatattgggcggttttcacctttttgagacagacagccgcctggagaagacggtggaatacctggcgaagctcggtataaaatccttctatccctgtcactgcgtctcattcagggcgaaggcgagaatgaatgaaacgcttccggtcgaggaggtcggtgtggggcttgcaatctccttaaaataacagactgttggacaccggtcaggtaaacaggctttcgaggcccgcccggccggtgactgttatttttcggtatccaagctctatataaccggcgtcgcaaaattcattcaggatctttgtcacagttacccggctcagtccgacgcagatcgccagttcttcatgcgaataggggagggtagagccaataatccccttgtcgggatttggcgtctcagtctcgtcgaggaggaagctggcaaccttttggtgccggttatagagtgtcaggcgtcttacctggctgcagaggtagttgcaggtgtcggtgagaagctgaaagaggatgaggcacagttcttccgactgcatcaggtatggcataaggcttttcgtcgtacaggagataagttgtacttccggtacggcgctgacggttgtgggacgcgaggactgcgccaggaaagaggagtcccctatcagccgtcctgctccggcgactgccagcgtcacttccctgccgtcgtcggctatataataaatgcggacgcggccttttttgatcagatagatggtcccggacggttcgccctgcatgtagataagcccccgggggaatggttcgcgtaatccccgcttgttcaaagtaacagaacagggattcaggcacttttatcatggatgtctcctttcaaaaccggtattgaattacatatcctgtataattgtaacatagattacagtttgccggaagcccctgtactatactgtgataacagtgaactactggttgaaaaatatatgataacgacagggagacatggggatgaaaaaagaatatattctggccgggggacaatcatgctgtgggggatgatgccgccgtttaccaagctattgctgagtgggttaagcaatgcaaaaaccgtatttatcagttcgatgattgcctttatttttatggccgtcctgaacctggcatgcggaaatttaaaacggtttctgcaatataggccaaaagattatgtgaaaatgattgcgcttggatttatggggaaatttctctattcggttctgtatttttacggactgtccgggctggcggccggcgatgcctgtatcattaattacctttggcctgtgatgactgtggtgttttcatgcttatggctgggagagaggtttacctggcgcaagagtatggcgattttcgcttcattttcgggcgtggttctggtggcgtcgaagggcagcatggaagggcttttgtcggggaatctgcggggaattgtaagctgcgtggcggcggctgtctgttacggagcttttaatgtgctgaacaaaaaggaaaacagggatcagtttgtcagtatgacggtctattttttctcagccgctctgttttcggggatttggtttctggcggagggagaatccatcgctttgaccggggcgcagaccgccggaattatatggctgggagtctttatggatgcggcagcatttttgatgtgggccctggcgctccagaatggggatacggccaaactttccaactttgcatatattacgccgttcatggcggtattgtattcggcactgctcctgaacgagccggttgatcggtattcagttatcggactgctgctgatcatgggcggaatatttgtccagatgggaggctcagagaggggcgcctctttgttcaaacgaaaacgtattgcctgacaaaagacgtaagacagaaaaacaatataaaaatacggatgacttgacagaggatggaagagatggagatatataaaataacggacaagaatctaataaagctggtaccgctgtttgaaggctgggaggagaccatgatccggtcggttctacagggtgaaatgggcagtgcgtgggcggactcgactgtccatccgagttccgccatgctgttcattgccgacttctgctttttcgcgggcgcgccgtgccgggagctggccgccaggtggatagaggaaaagggccgttttacaattatggtcccccagaacgggcagtggtcgtcggtgattagacaggtttacaaagacgcggcaaaacctattgtgcgctacgcgctgaaaaaagagtatgatatatttgaccgtgaaaagttaatgaagatgtcgcggatactgccggccggatatgaaatcagaatgatagacgagaggatataccatatggcaggaaaagaggagtggtcgtctgatctctgttcgcagtttccgacgtttgccgattacagggagcggggaatcggaacggctgtgctctttgacggtacgctggctgccggagcttcttcctacacggtttatcagggcggtattgaaatcgagatcgatacaaaggaggaacaccgccgccggggacttgccagggcatgcgccgccaggctgattctggaatgtctggacagagggctgtatcccgcctgggacgcacacaacaaggcatcactggccctggccctgaagctgggataccattttgacaaggagtatgaggcatttgaaatctgtaaacaggacagttgacggctgttcaattattatattcaaaaaaacattgacaataaagttagtatgtgctaaccttatttgtgggttagaaagaactaattttggtttgtgtgtcctaatgtcatgcgtgaaaaggtgatgatatggaaagggaggtaaatatgccaatctcaatgggtatggtaggttcatcctacacaataaagaaagtgagcggaaattccgacgtgcgttcccatcttcattcaatgggatttaatgaaggcacttctgtgaagctgattacacagcttaatggtgacgttatcgtccatgtgaaagaatccagagtggcaatcaataaagagcaggccagacacatcctggtatgattcgtatgtcggatgcgattaatagttgatataaaagagataatggaagattgacgggaaggagtatcataatgacactgaaagaagcaaaagtgggttccactgtaaaagtagtcaagattcacggggagggggcctataaacggcgtattatggatatgggcatcacgaagggaagcgagatttatgtgagaaaagtggcgcctttaggagatccggttgaagtaaccgtcaggggatatgagctttctctgcgaaaggatgatgctgactgtgtggatattgaggaaataagcgcctgagacacggcagcataaaattttaatgaatggttagcttggaataactaatattgtcaggtaaataaagtaacagttcatgctgtctgaatggttactaaataaatgtgagaatggcaggaggatgaaaaaatggcaatacatattgcattggcaggcaacccaaactgcggtaaaacaactatgtttaacgcacttacgggagcaaatcagtatgttggaaactggccgggagtaacggttgagaagaagacagggaaactgaaagagagtaagacgggagaggaagtgaatatcaccgatcttccggggatctattccctttctccatacacactggaggaggttgtttccagggactttattttaaatgagaaaccggacgttattatcgatctggtggatgcgactaatattgaaagaaacctgtatctgacgacacagcttcttgaaaccggaattccggtggtgcttgccctcaatatggctgatctgatgaggaaaaatgacatcaggattgatgtggaggcattatcaaagaagctgggctgcccgattgttgagacgtccgctctcaggaagacgggccttaaggaagtggtggaagaggcggtcggcgcggcaaagaaggcgcaggaacctgaacttcgtcccatctttgacaactgggttgagtcgagagtggaacagattgaatccgaacttcccgcaggcgtgccggaaggtgaaaaaaggtggtatgccatcaagctgctggaacaggatagtaaagttctggaacagtttgggctggcagccggaaaccggtattctaaatatgccggtgaacttgaaaaagaatatgacgatgacgctgaatccgtcatcacggatcagagataccagtatattcagaagctgattgaaacgacggttaagaaaccggcggctaaaatgagtgtttcagacaggattgacagcattgtcacaaacaggattctgggaatcccgatttttgtccttgttatgtggggtgtttactatgtttccgtaacaacactgggaactcttgtgactgactggaccaatgacacctttgtagccgctgtccagggacgggccggagggctgcttgaaacggccggtgcatcggtactgatgaccagcctcgttgtggacggaattataggcggcgtcggagctgttctcgaatttgttccacagatggcgatcctgttcctcttcctgtccattttggaagactgcggctacatggtgcgtatcgcatttgtaatggatcgcgtattccgccatttcggactttccggcaagagctttatcccgctgctgatttcatccggctgcggaattccgggcattatggcatctaagacgattgagcaggataacgacaggcgtcttaccattatgacggctacctttgtaccctgcggcgcaaaacttccggttattgccctgatgggaggcgttatggccggccatatgacaggcagcgcggctatcggcggtatgatggcgcctctcatgtacttcctcggaattggagcagtacttgtctcggctatcatgttaaagaagacaaaaccattttccggcaaaccggctccttttgtaatggagcttccggcttaccatattccttccgcaaagacggtgcttctccatgtctgggagcgtctgaaaggatttatcatcaaagcgggaaccattctgttcctggcttgtgtagtaatgtgggcgttatcaacctttggctttgagaacggggctttcggcattgtggaagagtcctccgcttctcttctctccgtaattggcggagcgattgcaattgtgttccgtccgctcggctttggcgagtggcagccggtggcggcttcgatttccggctttacggcaaaagaagcaatcgtaagtacgatgggagttctggccaatgtatcggaggaactttccgaggatccggatgcagttgcggcagctatccagtcatggttcccgtccgcggttgcagccttctccttcctggtatttaaccttctggattcaccgtgcctggcggcgattgccacgatggcgcagcagttccagtccaggaaatggttctggtttgccattctttaccagaacatctttgcctatgtcgttgccctgtgcatttatcagctgggcggtctggcagccggcgttgtagcgtttaacgtgtggaccgttattgcattaatctgtctggcatttatgctctttatgctgttcaggccggatccgtacagggctcagaagtcttatgcaagaagctcggtggaagcggcttcctgattttatattttgccggagtgataatctataaagtatatgatataataaaaaagacggttacccgtcatgcaaagaaacgaaactgacgaatatgaacggtatcggtacagataccagaaaagaggatgcggtatgcatacaattgatattatcatcttaacagtggtagcggctctgctgcttctggcactccgctccactctgaggcattacggcggcaagggaggcggctgctgcggttgttccggctgttcgggaggaagctcttcctgcagcgccggaggcagtgtggagccgtttatggctgccgggaaaccggcaggtacggacactctctccaaaacgcttcagattgaaggaatgcactgcggcgcttgcaaacagtccgtggagagcgccctggccggaataaacggagttgtctttgccgatgttaaccttgaaaagggaacggcaaaggtggtgatgagagaaaatgtggaggatgccctttttagagaagccgtggaagacaaaggatttcaattaaaggggattctgaaggcgggtacttaaacgcagcattaaaataaaagtagaaacggcgcaggattttgagtcctgcgccgtttgccggtatatacaccttaaaaaagcaggtgtacgaccggagctgccaaaataagtgaaagtacaaccctctcaaaccagatgatcagtatatccttcaggctgagcttgatatccgttccgaggatacacggaatagatgccgagaagaacagaatctcggaaacacatacgattgcaatgactgcctgtgtggccggagtagctgtggctacgatattcgccggcaggaacatctctgcaaggctgattgcacagccctttgcaaccatagctgcttcggagccaaagcccaaaagcatggtgaacgggaggaaaagatatcccagaatgtcaaataccggtgtgaaggccgcaagtacaagtccgaggaaaccgattgccatcagggtagggccgatgttaagagccatgttcaggccgtccacaaagtttttgacaagaccgtccacaaatttaggagcgcgtgaacaggcatgtaacccctcgtcaaaggcggtggaaacaagcttgcctttttctactttcggttctggagttacttccatgttgttatatcccttatcagattttttgcacagcggatagattcgtgtagtaatggctgtaacaacaaaggtgataatcagcgtggtccagaaatacaggttccagtgatccataagaccaagcgtctttgctacgacgatcataaaggtggcggatacggtggagaagccggtggcaataatgctggcctctttttcggaataaaagccttccttgtatacacggtttgtaatcagcagtcccacggagtagcttcccacgaaggaggcaaccgcatcgacggcagaacgtcccggcgtcttccagattggtctcataaccggtttcataaatacaccgataaattccatgagtccgtagttaatcaggaaggacaggaatacggcccctaccggtacaagaatcgtgaccgggattaccactttattaaatacgaaaggcagcatatccggggtgtggaagctttccggcccccagccgaagatggccattccgacgactccgataccgattactttgaagattgagaaaatagttgttacggcatccttgttccaggttttccggacaaacggaagaatggcgcccacgacaacgatcaggcccgcataaactacttcaaaataaggaatcgagcggagtcctgttacaatatggtcaatgggaattgaactttttccgcctacgctgatggtaacaaaaaacataaaaatgccaatcaggttcaacaggatgaatttcaatacattcgaactgcttcttgcattatctgtcatattcttttccatatcttgttcccctttgcttaaaatttaatttgatacgtatgatgtgaataaagtataacagaaataaaaaaacaaataagcttttacacaatattaacagctaacatccatgagaatgtcattattttatatgaaatatacataaaactactgattttaccgcctaaattgggcgaaaggtagtaagattgttaaaagtatgataaaattgagctggaattaaggaatgatttataagaataaaaggaaaaagggtattacttctatgaaaatgaacctgaaaaataaaatcacgtttaatatctgcgttatcgttaccttgtctctggtcgtaatgtgtacatctctctacgccatgtcggcttcaatcctcagtgaggattccaatacctttaccgaggttcagattctgagggcgcaggaaaagatagagcttcaggtcgataagataaggctggaaaccctggcgctttccagagaacagcgggtgcggaatttctttaaaggagaactgggtacggatgagctgaaccgcttcctgacggatacaatggaggctatgaaccgggagtcggagagctattattataaagacttgttttgtctgggaatggacggggtaattatatcatcaaccatgccaaatgccatgtatgtggatctttcgagcaggaaatatgtccaggacagttttaagaaaagcacgacagagacaagtgatattctgattgctctgacggatcaggcaagcattgtcaatacgactcatcccatatttgacgagaacggccagatgctggggctgttcggcattgccatccgggcggaaaaatttgtgggatttatcaagaattatgcgattggagagagcggatatttttccattgtggattcaaacggccttattctgtcccaccgggaaccggagcagatcgggaaaccggccgtcgatgtgcttccttttttcagcgatatgagcggggaggatacaggggaaatctataagcatgtggatcgtgaatacgtctgttcctataaaaaaatggatcagaatgactggattctctacaccctgatgcccaagagggagctggctgcaaaatcactgcagcttttaaaatccgttatcatattcgggacaatcatttccggctgtgctatttttgccagtatttacttctcaaataaaatttcctctccgattgacagcatcacgcagtatattaacagcgcggagagcgggaacgagattttgggcaattcgatcagcgagacaattgaaaacataaagacgaacaattttgataaggaggcgcacgcgctgattcagaaatccaggaagctgacggcgtcgctggagatgaaatcttacctgacagcccgcttcctgtctgcactgtcccacgatatcaggacttcgctgacactgattaaaggatattcgaaggggattttatccggtcttgtggaggatgaggagacaaaggagaggtttatccaggaaatctacagaagcgccgacacgctggagcggatttcctacgatgttctggacagcacctatgaggcgcagaacagtgagcagataaagatggagccggtatccgcagagacgttctgtgaatctctctatcagaacgcgcaggcttatgtggagaattcagaccggttatttgaaggaagtcttgagaaggtggaaggagagctgtatatcagcgatgtgaaaatccttcgtgtatggcagaatatgctgagcaacgcagtaaaatattcggcgccctattcaacggttacgatacggatcgccttggaaaacggaaaattcctgttccaggtatcggatcaggggcgggaatctgcgaagaggagcaggagtatatctttgatatgttttataaaggtgatccgacccagaaggagagctacggccttggactttatgtgtcaaaacagattctggaagcccatggttcccggatgtgtttttattccgttccgggagagggcagcacattctggtttgaacttccggccggaagcagagctatttaagctctgcctcaaacatatagccgacgctccggattgatttgatatagccttctcctacgcccagcttcaggcggagacgctttatgtaggtatttacgatattttcatcgtaaagatcgctttcccacacatcgaccaggatttgtttcctgctgaccgcattaaacgcatgatcaacgaggtaaagtaaaaggcggaattccgtattggacaaacggatttcctcgtcatcctttgtgacccggtaggcgctccggtatatcttatagccatcaaattcaatcggcgtttccatggtccgggatgccttgaaccgttccgttcgcccgatatgggcgcgtactctggcgagcagctccaccggatcgaagggtttgactatgtaatcatcggcgccggcgcccagggcctccaccttgtcaaaggaggcggcgttggcgctcagcatgatgataggaacatttccctgtttccggatccgcctgcacacctccactccgtccattccctgcatattgatatccaggataatgagatccaccgtctcatcatagagcgcgagtgcatccttgccgtttccggcgcacagggtctggaaattatagagcttcatatattcttccagcattctcacgacacgcttgtcgtcatctacaatcaatatctttttcatggatacattcccctttaatatgataagctgtaacagttcagacagcatgaactgttatgttcacaccccgcggaacattaccgtgttaacagtaacatcttttactcttattatagaaaggtttctcctggaaagcaagaggcggagttgtgcaatgtgactgttcgatggagatttagttaagcaggtgaggacgccgccggaacggccagcggacggggtggtggggggggtatgagtctttcgtcccgggggaggattatcgtggtttggggctgcgggcgaagataaagtctgcggagcacgctcccgctctgtgaaatgcatcgcgctgctaagctcgacaggacctcgctaatcagcgatggatttaggcggcatccgcagactttatcttcccctccgccccaaggccaggtttttgccgggacgaaagactccgccaagtgtatcggccccgtccgctggcctgcggccgctgaatgtctcacgcgttaagtgcgggggcggaccttgttgagaccactcagcgcttccgtgtacgggaaatgcgatatgccttcaatgcgcattttatataattgtggaaagtttgatttcagtttgccagaaacacgtagtggccgcgacagggccctctccatttaaggttggagacaatcagcgcccggaacggaccatgtccggtgccgaaaacctccgcctgagtgttccgtccccggcgaaaaactgacccggggaagtaggcggaatcaattgcggaggggacatgggagtccgccggtgcttagcgaggttcctcacgagcttagcattccgatgcgcactcctaagagtgcaaacggtccccgcagcaattcattccggccggattcccccctcacgacatcctccaaccggggacggaagactcagccagccctctcaccacaccggacatggtccgttccggacgcgtcctcccaacctcagttaaatctccatattctctgtaatgtcaactaaatgacacaaccgtgtgaatagtaacgtgcaattcctgcttgcattcccatatagaatctattataattagagtaaccggtttctctgaccaaaggcatgataaactagacgagtgcgggatcgcacaggaggacatttaaaaatggtaaaagattatctggaaaaggtgtattcaggatttctggggatgaatatcggtatccgtctgggcgccccggtggagccaaccatctggacgtatgacaggatccggaatacatatggggaaatcacagattatgtaaaagaatttaagaattttgccgcggacgacgatgccaacgggccggttttctttatccgggctctttatgatgatgcgaaggacagggaactggtccctcaggatgtcgccagggcctggttaaattatgccagggaaggcgttggcatgttctggtggggcggctatggaatcagcacggagcatacggcttacctgaacctgaagaacggcatagaagcgccccagtccggctctgtggagcagaacggcctgattctggcagagcagattggcggccagatctttatcgatacctggggactggtaaacccctgcaatccggaaaaagcggctcattacggcgaagcagcggccagtgtatcccacggcggagagggcgttttaggggccagattcttctgtgctgccattgccaaagcatttgaaaccgacgatatatttgaaattatggagacgggacttgcgcagattccaaaggacagcctgtatcatcaggtggcttcggctgtgcttgagttctatcatgcccatccggaggaagagtcatggcggagctgctatgagatgctggtgcgtgactggggctatgataaatatcagggtgtatgccatattatcccgaatgcaggcgtctgcttcatggctatggcatacggaaaaggccggttcgacaggacggttgagatagcgactatggcgggctgggacacggactgcaatgccggcaatgtgggaacggttctcggcgtggcctgcggccttaaaggtcttccggaacgttacaggaaacctgtcaatgacggtattgtatgctccggtatttccggctatctgaatatccttgatattccgaccttttcaaaggaactggcgctgctgggataccgcctgagcggtgaagaagcgcctgcctgcctggcggaaagctttaagaacggagaaatccattttgattttgaactgccgggaagcactcataatatgcgagtctccgatccgttcttctgcgccctgtcccattccggcgatcaggccttcagcggcagcggttcgcttaaaattctggtggatcgcatggtgcgcggtgaccagtgcaaggtattttacaagccgttctatacgcgtaatgatttttcggatgagagatacagccctgtattctcaccgactgcatatccggggcagaccgtatcgatgaagctttatctggatcagtgggagggctgggaaacgctggggattgcgccatacgtacataccgtttacgggaaagaggatctccttcagggctatatcaagctggttcaggaacagtggatcagcgtggaattcacaatcccggatgtagagggagacattgtggatgaggtgggtatcgtaattgagggttactccccttccaagaaaaaaagtctcggtttgatttacctggacgactttgcgataaccggaccttcggcgtatacgatagacataaaaaaacagaaaaaggaatttggctgtgtcacgccgtttgccaccgaccatggagcctgggatctgtatggcaaaaccttgaacctgatgcggtgcgaggaggcgtttgcctatacgggtaactactatggcacggattatacggtttcggctgcggtcataccgcgccacggggcttcccatctgattacggcgagagcccagggagcaaagcgcttctacgccgcaggctttgacgagaagggaaaagccgtgctgttaaaaaatgattttgggtttacggttctgggagaatgcggttttgactgggaatatgacagggaatacaggatgcagatggagtgccgcggcggacacatcatattttccgtcgacggggtaaaggttctggaggcggaggatgacagcttttcctatggaatgttcggctgcggttccgtgaagacggggcgtacctcttttgctgattttacttataattcatacacaggaagctgctgtccgcagactgccggttccggcaggggcggacagtaaccggaggagaaaggttgaggtgaaagaatgaggatattgaatttcggttccctgaatattgacaacgtatatgcggtagatcattttattcgtcccggtgaaacgatgagctctctgggcatggaagtcttctgcggaggcaaagggctgaaccagtcgatcgccatggcgcgcgcaggcgcacaggtatggcacgcgggagcggtgggaagaaatgacggcaaaaagctgcttgaactgctggcagaatcgggagtcaatacagattttgtgagaaagacggacggcgtgtcgggccatacgattatccaggtagataaaaacggccagaactgcattctcctgttcggcggagccaaccaggagattacgcccgagcaggtggatgagacgctggcccactttgaggagggcgatatcctgctgcttcagaacgaaatcaacggacttgccggattaattaaaaaggcggccgaaaagggaatgaaaatctatctgaatccttcacctgtgaccggggaacttctggaactgccccttgagctggtagactgttttatactcaacgagattgagggagccgatatctgcggtcaggaggcaaaggaggaggaaatcccgcagcttttgcatgagaaatatccgcgggccgtgatcctccttactctcggcagcaggggctgtatttattatgatggtgagaaccgttatgaacagccggccttttgtgtcgaggccgttgacaccacggcggcaggcgatacatttaccgggtattttattgcttcggcggtaaaaggcaattcggtgccggacgcacttttaaaggctgcgaaggctgcggcgattactgttatgggcaaaggggctgcaccctccattccatgggataagcaggtggaggaggcccggctttaaccttaaataagacgggggattgtttatggaaaacaagacaaaatacagtatatctcagattgcggagatctgcggcgtgtcgaaggccaccgtttccagggtgattaataacagcccgtgcggtgtaggcgaagccacgaaagagcgggtccgcaaagtcatagaggagttgaattacaggcccaatgcgcttgccagaggggtagccgtatcacgttccaggatgataggcgtcgtggtgcctgacgtgtctaacttcttttatcctaagattatcaggggcatcagcgattatctggaaaagaaagactattccgtcatagtctgcaactcggattataatccggagaaggaagcccagcttcttatgtcccttgtggacaaacgggtggacggcgtgattctctgttccggtatatcgaacaaggcgtttctggagaaatacaggaaataccaggtgccgctggtgcttttggggcgcaccttcgacagcagcgtcagcgacgcaagcatcacgggagataacgtgaaaggttccaggaaagcggcttcctatctgctgcgcggaggaaacaggcgcattgtctatgtggagggcaatacagaactttccggttccaagcagaggcttgaggggtatcaggaagcgctcagggaacacgggattacgtttgataagagccttacgatgtccggggaatattcgattgaattcgggcggagggcagcggaggaactgctggaaaagaaggtggagttcgacgcaatcatgacaggaagcgatttgattgccatcggcgttatttcagggcttctcgacgcggggaaaaagatcccggaagagatagaagtcatgggatttgacaatattgagctggcggaggtattccgtccggcgctctccactgtctccaagccgcattatgaaatggcccagcatctggcaaagcagataattcggattatcgagggggaggaagtgggactgagccacatggtcgtggaaccaaccctgaaactgcgccggacgacgaaagagcggccgtatgacagcgaatacgaataggaatcaagttaaaaatgaaacagtgtacacaggactgcagggaatgggtatctcgaacagggatacccattccctgtattctgttgaaggcggtgaccattgagaggtccgcctgtgctttgcgaaaaaaggagaaataaggaaaacggtttattaattatgtgctgaaaaaataatggaaaataaaaaacaatctggaaaaactagaaaataatagtgcaatatgctaaaaaatacgggggataaatttaacataatatacaattgatatcaaatatcaagtgtgttataataccaattagagagaaaccggttacttaaatttacagaaatgtacagagcgtagaaaagggggagcctgtatgcaggcaaaggtagaaaagaaagcagggaagaagaataagacgctgcagcatatgtggaaagacagggtactttacctgatgctggcgccgactcttatctactttctgattttcagggtatggccgattatcaatatgaggctggctttctgcaattacagggccaaagggccgtgggaatttgcaggacttaagtattttgacatgatattcaaatcatccacatttatggagattttgagaaacacgctgattatcagctttatgaagtacatacttctttttccgtttttcgtcattttcgcgttgctgctgaatgaaatccgatgtgggaagttccgcaagtatgtgcagattatttcctacatgccccatttcctttcatgggtcgttattgccggtatctggatttcgatgctgtctgtatccggcggcgccgtgaaccagattatgggatggttcggactcgacgcggtagattttatgacgaataaggggacgatacggtgggtgctgttcttctcggaaggctggcgaagcctcggatgggattccatcgtatactttacggcaatcctggctatcagcccggatctttatgaggcagccacggtggacggcgcgaagcggatcgacatcatccggtatatcatccttcccgcccttgtcgtaccgatgacaaccatgtttattctgaatctgggcttctttatgacagccggattcgaccaggtcttcaactttacaaaccagtccgtcaacagtgtaatcgacattctggatacatacgtttaccgtatcggacttgaaagcggccagtattccctggcgacggcggtggctcttatcaaaggcattgtgggagtgttcctggtacttgtaactcaccttgtttctaaaaaggtgacggggaagggagtgtggtaagaatgagaaagaaaaaattcagcattacgcagctgattctcactgtttttatgctgctcctgacactgacaatgattgtgcctcttttgcatattctggcccgttccctttcggatccgcttcagtcggccggaatgagcagcctggaagtaattccgagaggattttcactgattaactatcaggtgctgttcagcaacaagacactggtgccgtccatcttcaattccatctttatcacggtggtcggaacatttttaaatattgtactgacggcgctggcagcttatgtgctgacacgtcccggcctggtcggcaagagagtgctgatggtgttctttatcatcatgatgctgtttgaccctggaattgtcccggagtatatgaccgtaaagaaaatcgggctgatggggagccagtggtccgttatcctctgcatggcagttaacgtgtattatcttgtcattatgatgcgttactttgaggatgtgccggtgtcgctctgcgaggcggcgaagatcgacggggccggtcatctgagagtcctgttttcggtggtgctgccgcttgcaaaaccgggaattgcaacactgacaatgttttacggagtgacaagatggaatgagtatttccgttccggaatttacatctcatccattaagaaggtaccgctgcaggtaattctgcgtaagtttatcgtggatagtgatgtcacaacgataatcggaacacagaacctgctgaattataacgatttggcaaagattgattacacggctctccagtatgcgacgattgtgatcgcagtagttccgattcttctgatttatccgctggtactcaaatactatacaaaaggtattatggcgggcggcgtgaaggagtaatgcacgggaaaatggaaagacagcctgagaatatgaaaagggtgtaataaaaaatcaaataaaatggaggagaagacatgaaaaaaacattggcactgattatggcggcagcgcttgcaggctccagccttgcagggtgcggcggcaaagcggacaacagcgcgccggagaccaaaccggccggcagcgaagcagataacgggggagctgtacaggcagagggaacggcagagttcccggccatcggtacggcagatgcacctgttacggtaaaggtaatgattaaggacgtattcccggatgaggaggatgtgcagctcttacgggaggcaattaatgaaaaaatggcggctcacggccagtacgtcaatttggagtttatggaaccgccggcaggaagctatgcgacggcagtgccgattgcaatgatgaacggtgatgtggaagcagatcttatctatttccagggcggcgatctggctttggcacagcagggactgtttgaagacctgaacccttatgttgaaaaatcgacatttataaagagcattatgacggacgtcaacagaaaacgtatggagaattacccatacctgatttggctggccccatcccggatccagattccggcaatgagaaaagactgggccgctcagcttgattcctatgagaaattaatcgcagacccgaccgttgataattattacaacctgttcaaggaaatgaaagacaaaggccttgtagagtatgcaatgacgaccgacggcggttccggcaacagtacggtccgtctcgacagcatctttaaccaggcgtttggcgtaacaggaacaatcgttaaagaggatggaaaatggatattcagcaaagagagccaggcagaaaagaataagctcgaattctatgcaaagctttataaggacggccttctggatccggaatatctgaccgatacatgggatacgatggaacagaaattctacgaaggcaaaacaggaataatcgccgggacactttcctccacccagatttatgacaacaagatgcgctcagttaacggcgaagagtcggaacttgtgattcttcctccggcaaaaggtgtggcacagggatacagggcagaggatgtaacaaaagaagagcgcggttttgcgatgaacatcgattccaagaataaagatgccgcatgggcggtgctggaattcatggcaagtccggaaggcagaatcttagacaaggtcggcattgaaggaaaacattatacagttgaggataacaagattgtatttacggacagatggccggaatggtgggcacgcttctgggatacgacaaataactttgacccgcagaatccgtcccttgcacagccggtactgacgactgtcggacagagcgcatttgataatcttgagaaatatattgttcaggacgtcaacatcctgattccggaagagatgacgccgcagtgggatgcgatgacaggatattataaggagtactccgcagatatcatcagaggagtaaaaccaatcgatgcattcgacgagatgacggcaaaatgggatgaagcaggcggaacagaatttgagagtatcttagtggaagagctgggaaatccgtgatgataatccggaaggattatatataaaaaagtaagtatatttaaataaaaaatcggcagaggtaaacaggaggatgacaaatgctgacaagagaagagtttaagaaaaatccggagctggtatttgacaaggcatacggttccttatcaggactggcaatcggagattcttttggagatgcttcaagaaagcaggaaaaccgtgaaaattatgctattacaactgattttaacagcaaggcttcatggagtacagatgatacggaattcgcactgctgacagcaaaaaccctgattcgctgcggtggggagctgacatcggaagaagtggtaaaatcctggcttgaggatgttgcaatacaggatgaatttaaacgcggcggtgccagcgagattgaagcagctaataatttgagaagaggttttcttcctcccctgtccggtaaatacaatgccttccacatgagcgacggatccgcgatgcgtatcgggccgattggcatcgtttgcgccggtgacccggagaaagcggcggcaatggcaaagattgaatccgaggtaagccatttccgcgacggcgtttggggagcgcaggcggtagccgcagccgtatcggtagccatggtggacggtacgatggatgagattctggatgccgcaatgaaggtgattccggaggagtcctggctctattattcaatgaaccatgcatttgaactggtagattccgccgacggacatattttcgatgtgtggatgcagctccatgacgacttaagaaccagcacctgggccacgacggcagaggcaattccatccgcatttgcctgcctgaaggcggtcaataaagatttcaggacgggcgttgtggtggccggcaacttcggcagggatgcagacaccatcggagctgtggcaggaactgtcctgggagctaaatacggcgcgaaagcaatgccggcggcatggattgacaaaaccagattcccaacgggaacatgcctgaactttacaaagggaattgatattaaagactatgcggagaagctggctgggattattatgaaataaaaatcccgaagagaaaatccgattataaaatctgataaaagatgcttcccaaaatatcatggaagaaaatcataaaatttggatatggggacatcccgtccatcggcagaaagattattgtaagcgccggtgggtgggatgtttgttgctgttcacacggatgttttgtaacagttcagacagggcgctgttgccaaaatggagatttaaccgaggtttggaggacgcgtacggaacggaccatgtccggtgtggtgaggggactgactgaatcttccgtccccgtgggaagttggttgtggagggggaatccggccggaatgaattcttacgggaaccgtttgcacttttcgaagcgcatagccgtgctaaattcgtgagaaacctcattaagcacggatgggcttccatatcccctccagaattgattccgcctacttcccccgttcaggtttttgccggggacggaagactcaggcggaggttttcgtggtaccggacatggtccgtttcgggcgctgattgtctccaaccttaaatggggaggaccctgtcgcggccactacgtgtttccggcaggccgatatcaaatcctccacattttttataaaaggggtattgaaggcatatcgtatttcccacacacggtagcactgagtggcctcgacaaggtccgcccccgcacttaacgcgtgagacactcagcgtccgctggccgtaccggcggcgtcctcacctgcttaactaaatctccattttagaaccgctccctgtctgtactgttacgatgtttttgttgaggacggaaaaatttgcaggaactctttgctttctcacccgatacaggttataataggaaaagacttttcaaacatacgtacggaggaatctatgtctacaacagacggggcggtaacgcccattctcaaatgggtaggcggcaagaggcagcttctcgatacaattgtgccgctgataccggaatacacaacatactatgaaccttttgtcggcggaggcgcggttctgtttcatctgcagcctgtgaaagcggtaatcaacgactccaatgccgaactgattaacatatacaaagtgatcaagtcgcagcccgaggaactgatcgcctgcctggaacgccataaagaaaacaactgccaggaatacttttatgaaatccgttctcttgaccgagacagggagcaatattccaggatgacgccggtggaacaggcggccagaattatttatctgaacaagacctgctacaacggcctgttccgggtaaaccgcgccggagagttcaattcaccctggggccggtataagaatcccaatattacgaatgagacgacgatacgttcgatgagcggttatttaaataaggcgaatgtgacgattcgctgcggcgattacagggattcgctgaaggggctgaggaaaggctcatttgtctatctggacccgccttatatgccgctcagcacctcctcttcctttacaggatatacggcggccggatttggggagcagcagcagagggagcttaagaagcagtgcgatatgctgagtaagaaaggaatcaatttcctgctgtccaattcctgctgtgatttcatagaggacttatacaaagattacattgtggagcgcgttgccgcgaagagggcaatcaatgcgaaaggcgataaacgcggggctattgatgaagtgctggtgagaaattatgagcataatagatgataagtggaagctgctctttgaccgatatgatatagaaaaaaaggtgtcggagagcggccccttttatattacggccgatcagattcgtgagtataaagagccgaggctgatgacgaagtttgatacgagggaatcgcttccctccgtcttcggcagccgtctgggcatcctgccggtgacaaggggaacctacgtgataggggattttgatctctatgcagattttccggagcagggagggccgggaaatttggtcccggggacccgtgtgcccggtgtaaagaaggcggcaatcccggattattatgagacgattgatatcaatgatatccgttcggaagccggagcaatcaacgttatggggatttccggtattctggatgactttctgggcggtgagaactttaagcagacggtatccggccggatggcctccggtaaatttacgtttcaggtgaatcccgtaagggcgggcgccaaagcgccggaaacatacgggataaacggttatcagattgcggtaaataattcgcaggtcgagattgacggaggctttgaagatcgggataccttcgccatgatagagggaaagaatgtggtgcatagcaatttcctgattcgccagctctactatccctacaggctctggaacgggaaactggccaaaccggtcaggcccgtttttatggtatattctaataatatattccgtttgctggagtacgaatttaccgactcctcatgctataattcgatacgtctggtgaaagagggactttacagtctggaggatactgatatttccatgcaggatctcagggaggcctgggagcgtacggcggtaaaaccggaacctcccgtagtgtttatccaggcggacagctttgagaaggtgatttctctggtggagcatctcaatgacagagcccttacccggcggaaatcgcggaggtgttcggattccgggagcgccagtcggattattattttaacgcctgccgtttcctcggcctggccgtaaaggagaaggatgaggagcggaacgtcagggtgacgataacaacaagggggcgcagcctgctgaagctcaattataaggccagacagatacggtacgtacaactgattctggaacacggaatattccatgatttattcggaattgttctgaggacggggagataccggataagaggtatattgaaaagtgcattgtagaacagggcctttgcagcagcagcgtagcaggaagaagagcttcgtcggtgagcggctggctgagatggattgcggggctggtgaagggataaaaaccgctccgcggaggagcgcaactctaaagagcgcttgttcactaagcccgttacacccactaagtgagccaatgcctgcggcggcagggaataatgccgccgcagcgacccgccgcaggcggagaatttcgcaagcgagattctcacatgtagaagttattgaagaggttgacctgtgcgcagcgcttacaggcaatcacattatgcatttggataaattaaccggctttcgtcaattccttccaatacctcttttaaatacttgccggccacatactttgccatcggaagattcatatccaggtaatttccgcagtcctttgcgcaggctccgggtacctctccttcaaaaccggagataaatgtaaacattccggttataagcggaacaatatccgccgagttccagtcaccggacagaagaaggtagaaacccgtacggcagcccatcgggccaaagtaaataacatggtctttcatggagtcatgatttctcagataggtggctccgagatgctcaattgtatgaatctccgccgtattcaagaccggttcataattggggcgggtcattcttatatcaaaggtggtaatgaggctgtcccccgcctgatcctttcttgagacataaattcctggtaatagctttagatgatcaatggtaaagcttgcgattttgtccatcattttatccatagatgaagtactcctttcaaagtaaaatacatttccgttgaaacaattttatcagaatattcatattaacgcaagaaagcagcagaataaggattttagttacagttcacactccgccagaaagcggcgcgctgcgaactgtaacacgcttcgcgatgcacagaaactacataaaacgcagtttcgcgccgtgtaactcgggatttttgcgcagaaaacacacgaaaacacctcgcgggacataatcgtgtgaacagtaacggattttaacttttccgatggaaaaatctgaaagcccggcttgcaagaggaaagcttctgtattataataagaaggtattttcagaaaataacgtcgaatgacacaaaacattatacaaagcataatacaaaacataataccatatgagtggtacaaagcggttggttacaacatcgcacatactctggaaagagcggttattgcaaaactgcggcagaacaggaagacttacaaggcgaattgaattagaaggagatagattatgttagacggtaaaaaaacattattcagcggcatgcaggccacagggaacctgacacttggcaattatctgggagctttaaagaactgggttaccatcagcgatgaataccagacctttttcagcgtagtggatatgcattccatcactgtgcgccaggatccggctgaactgaggaagagggccagaacgcttctgacgctttatattgcggcagggcttgacccggaaaaaaactgtatttattatcagtctcatgtcagcggccacgcagagcttgcatggattttgaactgtttcacttatatgggcgagctgagccggatgacccagttcaaggataagtcggcaaagcatgctgacaatatcaatgccggactattcacctatccggtcctgatggcggcggatatcctgctgtaccaggcggatgtggttccggtaggaattgaccagatgcagcatctggagctgacgagagatattgcgattcgttttaataatatttacggtgatgtatttactgtcccggaggcatatatcggaaaagcgggagcgaaggtaatgagtctgcaggatccgtctaagaagatgtcgaaatcggatgaaaatccgaacggaagcatctatctgatggatgatcccgatacgattatcaggaagttcaaacgcgcggtaactgattcggaggcttgcgtccgctacagtgaagagcagcccggaatcaagaatctgattgatatctactgtgcatgtaccggaaaaacggcacaggagacagagagggaatttgaccaaaaaggctacggcgactttaagcttgcggtgggcgaggcggtagtctctgtgctgaagccgcttcaggagcgttttgccgatctctctaaaaacaaagattatattgacggcgtaatcaagggcaatgccgagaaggcgcagtatttttccaataagacactgagaaaagttcagaaaaaagtgggttttcctgagaaaatcagataaaagaagaacagtttcaaaggcgaagctgccggccttttccatttgcaggatggggcggcagctttttagaaatgaagagcttgataatatggaggaaatgaaatgagggtgttgacgtatcagatagatgacagggagaggcttggaatcctgagcgatgatgagcagtggatttatcctgtagaagccattgggatggaataccgggatatgaaggagctgattcgtgaaatcagcgattcggagatccagcttgccgagcatatagcaggcaaacagccctacgaggcggagatcagaggcgctacccctctggaggacgtgagactgttggctccaatcccgaatccggagcaggatatcatatgtctgggtgttaactatatggatcacttgaaggaaagcagtgatttcctgaaaggagcttataaagaagaacaggagtatgccgtttattttggaaagagagtcaaccgcgcatcgggcgataaagagacgattccttcctatccggggctggtggatggcctcgactatgaggcggagcttgcggtcatcatcggaaaagatgccaaggatgtgccggaggagaaggccggcgagtatatcttcggctatacaattcttaatgatatcagcgcaagaaacatgcagaatcgccatggacaatggtactttggtaagagtctggatggatttaccccgatgggaccgtggatcgtgacggcgaatgagattgaatttcctcccaggctttccatcagctcacgagttaatggagagattcggcaggacgccaataccggcgatttgattttcgggatagcccatattatcagcgagctttcgaagggaatgacgctgagggcgggaaccgtgatttcgacaggaacaccggcaggagcaggagttggatttaagccgccgaagtatcttaaagcaggggataaggtggaatgcaggattgagaagattggcagtttgaccagtttgattgggtgagatcctttatagaaacagtacagaaagaagaggaacctgtgtttttaagtaatctggttcctcttctttcttcatatcgatggcagtggcttgtgcgcggagactgcaggttatcgtgaagccgcagattattttacatgggcttcaaattcttattcagccgctcaatcatccaagccaggcgtttctcccgtccggcctctgtttttgcatccaaataagcacgcgtataagtctttttgacggacggcggcatggcctgaaaattagtgaaggcaggttcatgggtttccagcagagcagccacagaggcaatctcttcttccgttattgccggagctttcggcgcgttccattggccgttctttttggcttcttctattttctttctgccgtagtcggtcataatcccctgcttttcaagctgttccgccagctttttattcttttccgaccatttactgttatcccttcgcagtgaaaaatatttccgataagatgtttcattcatgctcttcatctggccgtcaatccatccgaagcagagggcttcttcaagagcctcatcagctttcactgtttgcggtccgcccggcttgccgaacagcagccagacaccggcgtcggacaggcaattctcgcggagccagtttctaaaatcatttctgcatgcaaattccaatacttcactcatagttctcccgtcccttcttgttacagacgcagtcctttaatatccttaacacgcgataaaatcacattcgtactgatggtaacgactccgggcagccggtctatcgttccggagatgaatccatccatctcgtcctgacctgccgcgacagcatgtacatgcagccggcagtttcccgttacccggtatatctgcgtgacgacagggcaggaatacagcatctgcgtaacctcagagaaagtctccggttttgtctctatttcaaaataacaggatatcgccccgctgagcttgtggggattaataaccgccgtatattcctcgatgatgccctgttcctccagcgcattgatatggcttttcaccgcaacacgtgaaactcctattctctcccctatttccgaataagaataccgggcattttcaataagcagctgcaatatcttctggtccagctcgtctaatccgctcaagtacatcgcatcacctcataataatcgttcttttaatcagaatatcataacatttatatcgtgtcaaattgaaagaaaataattgcgtattgttatcttatatgctattatacatgacatatagaaattataaaattaacaggtgatggtatgtatcgtgatttaacgaaaggaaatataacaaaaacactgctcgtattctccctgccgatgatagccgggaatctgctgcagcagttttacaacattgcggatacattgattgtcggcaagtttctcggccgcgatgcactggcggcggtaggatcggcctacacgcttatgacatttctgacctcgatccttttaggaatgtcaatgggagcgggagccttattcgccatctatcagggacagggcagccgggaacggctgagggccggcattgttcaggcattcggcctgatttctctgctgacggtaattttgtacatagcggtctatctgtggcttgatccgataatgatttttctgcgcgttccggatgaggtatatgctctgatgcgcgaatacctgtggattatattcatcgggctggccgccgtattcctttacaacttttttgcatgcctgctcagagcccttggcaactcggttacgcccctggtgtttctggccgtctcagccctgctcaatatcgcgctggacctgttgttcgtgctgcggttttcctggggcgtcgggggcgcggcagcggctacggtgattgcccagtatgtatccggtgccggaatattcctgtatacggtgttctgctgtaaagagctgaggcccgcaaggcggcatttctgccgtaatccggagattctccgcgatatagggaagctgtcggtgctgacctgcgtgcagcagtccgtcatgaatttcggtattctgatggtacagggtctcgtcaacagctttgggcctgtcattatggcggcttttgccgcggctgtcaaaatagattcctttgcttatatgccggtgcaggatttcggaaatgcgttttcaacctttgtgtcccagaactacggagccggtaaacatgaacgcatccgggaagggattaaaaaggcggcggttacctctgtgctgttctgcgtactgatttccgcactggtattgttgtcggcaaaacagcttatgcttatctttgtccagccgcatgaaacggatatactggcggccggagtgcgttatctcagaattgagggagcattctattggggaatcggctgtctgttccttctgtatggattctaccgcgcggtaaaagcgcctgctatgtctgtagtgcttaccgtgatatcgcttggaacccgcgtacttttagcatatgcgctggccggaccggtgggtgtggatggtatctgggcggcaattccaatcggctggattctggccgatgcggccggagttatctattacagaagccatcgggagagcattctgccttccctgccgggctcctgtgaggaacaaccgtaacaagccggagcgcgtgatccgatacatcatccgtcaggtaaaataatataaaaattttaaaatttattattgacgcagatttcgctctatgctataattcaccagaaatgaacaagggcgttcatgaggtttggcctcatggacgtctttttttcatttcatttaaaaaagtacgtcctatgaaataaaaaacgctctgcgaagattgcatatgtatgagaaagctgctgctgtacaaaatagaagtaaagcttctggaggataaaagcacaggtgaaaggaatggtgacaggatggaaagaacggtatatcttcttttggaaaacggcaaatattttgaaggaaaaggatttggagcctctttagacgaagtgaccggagaggtggtgttcacgaccggaatgacaggataccttgagacaatcacggatcccagctattatggacagatagtcgttcagacgtttccaatgattggaaattacggagtgatcccgcaggattttgaaaacaaggaagtatacttatcagcatatatcgtaaaagaatggtgtcaggaccctccaacttcaggagcagcggtaatcttgacactttttttaaagaaagaaaggttcccgccatttacggaatagataccagaaagctggcaaagactatccgtgaatacggttccatgaacggaaggctgaccgtgaaaaagccgccgtacgggccggaggagctggagcaaatacgaaatttccgcattacttctgccgttgagagcgtgacaccggccggctgccatctcattaagacaaatggggaagcggattaccgggtagtattatgggatttcggcgcaaaggaaaatatcttgagagaacttacaaagagaggctgtgatgtctatgatgcgactgcatcgactacggctgatgaaattctggccctggatccggatggaattatgctgtccaacggtccgggcaatccggaggacaacgcccgtgttatagaagaactgaaaaaactggcagtggccaagaggccgatattcggaatctgcctggggcaccagcttctggccattgccagaggggcaaagacaggcaaaatgaaatacgggcacagaggggccaaccagcctgtcaaggacctggagacaggccgtatctatatcagcagtcagaatcatggctatgaagtactgagggagtcacttccggccggagcagaggagacttttatcaacgtcaacgacggaacctgcgagggcattacctatcgtgatatacctgccttcaccgttcagtttcatccggaagcatgcgcgggtccgaaagatacggaagaattattcggccggtttatcaagatgatggagaaatacaaggaggaagcgtcatgccgttaaataaaaacctaaaaaaagttatggtgattggttccggccccatcgtgatcgggcaggcggcggaatttgattacgcagggacccaggcatgccgtgcactgaaggaggaagggcttgaggtggtgctggtgaattcgaacccggccacgattatgacagacagcgccattgcggatcaggtctacattgaacctctgacgcttgaagtggtaaagaggattatcgataaagagaagccggacagcattctgtccactctgggaggacagaccggccttaccctctcaatggagctggcaaaggagggatttctcgagagccgcggcgtcgccctgctgggagcatccccggaaacgattgataaagcggaggacagacagtgcttcaaagatacgatggaagaaatcggggaaccggtaattccgtctgaagtggtaacgacagtggatgcggcaatggcttttgcagaaaaaataggatttccggttatcgtcaggcctgcctttacattgggcggaacgggcggaggcatcgcaaagacaaggagagagcttgatgagattgccacggcggggatccgcctgtcgccgattcatcagatactggtggaaaaatgcattgccggatggaaggagattgagtttgaggtaatgcgcgacagcgtcggcaacgagattaccgtctgctcgatggagaatttcgatccggtgggaatccacaccggcgattccatcgttatcgctccggcagtcactctggccgataaggagtatcagatgctgcgctcggcagccctcaatatcattcaggcgatggggatagaaggcggctgcaactgccagtttgcattaaatcccgagagctttgagtatgcggtaatagaggtgaacccgcgtgtatcccgttcttccgccctggcatccaaggccaccggttacccgattgcccgggtggcgacgaaaatagccgtcggctaccgtcttgatgagattccgaacgaggtgacgggggagacgatggcatgctttgagccggcccttgactatgtggcggtcaaatttccaaagtggccgtttgataaattcgtatatggcagaaggaagctggggacacagatgaaggcaaccggcgaggtcatggcgatcggcagaaactttgagcaggctcttttaaaagcagtcaggggagcggagatttcccaggacagcctgaatatgaaaaagatggagcctctcacaggggaagagctggagcagaaaattctttcccaggacgatgagcgtctcttcgccgtatatgagagcatgaagcgcggtatgacggtggaacggcttcacgaactgaccgggattgacgagtggtttttaaataaactgttacacctgctgacgctggagcgaagaatgcagggagaattgttcacagaagagcttcatatggaagcaaagcagtacggtttcccggaccgggtcattaaagagatgaccggtctgacagagctgaaacatatcccggcctgttaccgtatggtggacacctgcagcgcagaatttgccgccagcacaccatacttttacagttcctacggcgaggaagatgaagcagggccgttcatcatggaacatgcggcgggaaaacaggttgttatggtgttcggttccggcccaatccgcattggccagggaattgaatttgactatgcgtcggtacactgcgtttggtcactgaagcgcgcagggtacgaggtggtcattgtcaacaataacccggagacggtgtccactgatttcaacgtggccgaccggctctattttgaaccgctgacgccggaggatgtgatggaccttatccgggtggaaaaaccggccggcgctgttgtggcctttggaggacagacggctatccgcctgacgaaatgtctggtggagaacggggtcccggtactgggaactccggccgacagtatcgatatggccgaggacaggggaaggtttaatgcattattgaaaaaactcaatatgaaacagccctctggcgataccgtttatacggaggatgaggcaattgcgacggcaaaccggctgggataccccgttctggtgcgtccaagctatgtactcggcggccagaacatgatcatagcgtatcatgatgcggatatccatgaatatatgaagattatccttgaacacaaaatagaaaatgccatcctgatcgacaaatacctgatggggaccgagctggaggtcgatgcaatctgcgacggggaggatgtcctgattcccggaattatggaacatattgagcgcgccggcgtccattccggtgactctatcgccgtatatcccgcctttatgctgacggagagccagaaggaccggattgtggattattcgatccgccttgccctttccctggggacaaaagggttgattaacattcaatatgttcttcatgaggatacgatttatattatagaggtaaacccgcgttcatctagaaccgttccttatatcagcaaggtgacgggggttccgatggtggatctggctaccaggattatgatgggtgaaaaattaaatgagatgggatatgaaacaggtctttatccctcatctccgtattatgcggtaaaggtacccgttttctcgtttgagaagctgtccgacgtcgatacccagcttgggcctgagatgaaatccacaggtgaggttctggggattgcgggaaccatggaggaggctctttacaaaggaatgatcgccgccggttattatatgaagagaaacggcggaatccttatcagtgtccgcgataccgataaaaaagacttaaaagagcttgcaaaggcatacgtctctatgggatttaccatctatgcaacggaaggaaccgccagaaagctgaacagcgcaggcatttcctctaccatcgtgaaaaaaccgaaggaagcggacgaaggggaggagactactatttccgtaatggagaaggggcggatcagctatgtgctgtcaacatcggtcacgggccgccagccggaccgagacagtgtaaggcttagaagaaaagcggtggagcttgggattccctgccttacctcccttgatacggcggcagttctggcgctgagtctggaaagtaaatacgatgaagataatgtggaactgatcgatatcgcccatattgtccatggggcggcagatcaggatgaagcgcggcagataaaaaatgcggaggatatccatattccgggatatgtgcttcagggacatgcagattaaaggttaccgttcgcggaaccgcgtttttttgcggggccgtaaataataacgattatagaggaggaaagcagatggcaaaatttattttcgtaaccggcggtgtcgtatccggccttggcaagggaattacggcggcttctctgggacgccttttaaaagcgaggggattcaaggttgccgcccagaaactggatccttatatcaatgtagatcccggtacgatgagtccctaccagcacggagaggtctatgtgacggaagacggtgcggagacagacctggacctgggacattatgaacggtttattgacgaggatttgaaccggtattccaaccttacgacgggtaaagtctactggaatgtattaaataaagagagaaaaggcgaatatctgggggagacggtgcaggttattccccatatcaccaatgaaattaagtcttttatctatcatgtgcaggaacagacggacgcagacatcgttattactgagatcggcggtacgactggtgatatagaatcccagccgtttcttgaggcgatccgtcaggtatcccacgaggcaggccgtggaaactgtctcttcatccatgtgactttgattccctacctggagtcatccggggaacataagtcaaagccgacccagcattccgtaaaacagctccagtcattcggaattatgccggatgttatcgtggcacggtgtgaccggccggtggagccgtcaatcctgaagaaaatcgccctgttctgcaacgtaaaggaggactgtgtcattgaaaatctgacgctgcccgttctctatgaggctccgataatgctggaaaatgcaggactggcagagattgcgatgcgtgagctgggaatttcggacagacaaaaaaaatgcgatctgagcgagtggaatgagatgcttgaccgtatcaaaaacagtaccggagaagtgacggtttccctggtgggaaagtatgttaagctccatgattcctacctttccatcgccgaggcgctccgccatgcaggctgggaaaacggcgtgcgggtgaatatcaactggatcgacagcgagagcctgacacgggtcacagccccgaaacttctggccggaacagacggtatcctggtacccggcggttttgggatccgcggtacggaaggaatgatagcggcggcggaatatgcaaggaccaatagggtgccgtattttggaatttgtcttggaatgcagattgcagcaattgaatttgcaaggaacgttctgggatatgaggatgccaactccagtgaatttgacccggagagcagccatccggttattgccctgatggaagagcagataggacaggagcagaagggcggaactatgcggctgggagcctatccatgcaggattacgcctggaacaaaaatggagcatgcctatatgtcggaagaaatcagcgaaagacaccgccaccgttatgagtttaataatagctaccgcagcgagtatacggcaaaaggagccgtgttttcaggccagtctccggacgggaacctggtggaagccatggaggtgccgggccatccgttttatgtgggagtacagtaccatcctgaatttaaaagccgtcccaacagggcacacccgctgtttcgcgaatttataaaagccacatcgaaacctaactgatacaaaaggaggaaagttaatgaaaattaattcaaattataaaaatctgccggaaagctatttattttcaaaaatcgcaaaaaaggttgaagaatatactgccttacatccgcaggctcagattatccgtatgggaatcggggatgttacgcttccgatttgtgaaaaagcggcggcggctttcgtaaaggcggcagcagaacaggggcgggcggagactttccatgggtatggcccggagcagggatatgattttctcaggaacacaatctgtgcctactatgaaagtatcggggtgcatactgcggcgagcgatatctttatcagcgacggcgccaaaagtgatttaggcaatatcctggatctgtttgatcaggataataccgtacttatcccggatcccgtctatcccgtttatctggatacgaatatcatggcagggagaaagatagtatttctggatgcgaatgtggataacggctttttgccgctgccgccccagggacagagggcagacataatttacctttgttcccccaataaccccacaggcggcgtttataacaggaaacagctgaaggaatgggttgatttcgccaatgaacaggacgcagtgattttatttgacgcagcctatgaatcctttatactcgataacagcctgccgagaagtattttcgaaatagaaggcgcaaagacatgcgccgtcgagttctgctcgctgtcaaaactggcaagctttaccggaacgcgctgcggttacactgtgatttcggaggaactcatgagaggtggaatgtctgtcaggaaaatgtggctccgccgtcagacaacgaaattcaacggggtttcctatccggtacagagagcggcagaggccgcattttcaccggaagggctgagagagtgcaggaaacatctggatgtctatcaggaaaacgccgggattatcacggacactctgacatcccttggaatctggcatgtgggaggaaaaaattccccgtatgtctggatgcagtgtccggatgggatgaaatcctgggagttttttgacgatttactcgataaagcccatgtggtcggaacaccgggaagcggttttggtaaaaacggtgaaggttttttccgtctcacggcttttggaactaaagcgaatacggccgaggccatggaacggatcaggaaggtttatggcagatagtttaaaaactgttatgagaaaattcataaaatatacaaaagctgttgaaatcacggcgcaatgcggcctgatttcagcagcttttgtatataaaaatcgctgtgcggtgagccggatgcctgccgccactaccttttctcagtccgcgcagttaatgcgcagacctgtctgagccattgcgttaatttaacttacaattaaatacaattatatctgaaaataatttatttatggcaaacaatttcagttgacaatggaaaataaatatgtataattagattatacaagtgaaatacatgtgagatacaggcttgaagtcagggagggaattatgccggtattactgagtgaggattatacatatccgctgccagaactctgcaaagtacagcagatttttgacaggactttgctggaagatgtggagggaactctgaagagagagctggcgaagaaagagattacgggaaagattcatccgggcgaccgggtggcggtcgctgtggggagcagaggaattaagaacctttttcttattgtcagaaccgtgattgaagatgtaagaaagaagggcgggattccttatatagtctcggctatggggagccatggcaacggaacggaggaaggccagagagaagtgcttgccagttacgggattacagaagaaaatcttggagtggagattgtcaccacggttgatgtgaatcatctgggcaggactccttccggcaaggacgtgtattttgacagggccgcgatggaagcggatgcggttattcccattaaccgcgtaaagctgcacacggactttgtaggcgatttgcagagcggtctttgcaagatgctggtaatcggtctggggaaccagataggatgttcctccatccatgaggaggatcccgatgaatttgccgcaattatagaggatgccgccagtctgatacttcagaaatgcagaattgcctatggcatcgccgccattgagaatgcctatgacgagacatttatgattgaggcggttgcggcagaaaatatgattaaacgggagaaagaactggtgaaaatcgccagaacgaagatgccggttctcattccgccgaaaatagacgtactgattgtagaggagattggaaagaatatttcagggccggctacgacccgaatattctggggaaaagttccgtattaaaagaattttgccttccggttcccgagataaaaaggatggttttactgggagtcacaccacagtcccatggcaatgccatcggaatcggactctttgacgtaacggtgaaagaagtctttgaacagctcgattacgaagcgatgtatgccaacgccattgcatgccgctgtattgaagactgccgtgtgccgctggtagcggccgatgaggatgaggcggtgcgtgtagccatcaagtgcatccggaatgtaaagaaagaagatttacgtatcgtaaagattaaaaacacactggaactggaatatatccaggtatcgaagaccgtactggaagatatcaggccggatgagaggatcaggatactgtaaaaagctgataaccaagttgaaccataactatatatgataattttaaggaggaggtttttatgaaactgacacaggaacagcaggatatgctggatggaaagtatggaaagggaacagcatacgcgatgaagattcaggtagccatcggcgaatgctttgacgcaaagcggatggtgcccatcaccagggcccatgtggctctctccaatcaggaggcggacttatggttctgcgagaagctgctcagcgaaggcgcacactgccgtgtggctccgaccgttaacccgggcttctgctatgatttctttacaaagagagatatggtggatccgaaattcgccgatttaatgcagagaacccataatgcatataagggaatcggagcgcagcttacttataactgtaccccttacatagacacaaatgttccgatgtataaagaggtaattgcattctcagagtccagcgcaacaccgtatgtcaattccgtatggggagcgagaagcaaccgtgagggcgccaacagcgcgctctgtgcagccgtgacaggctttgtgccggaatacggccttctgctggatgagaacagaaaaggcaatatcctggtggaggtacaggcagatatgaagaccgcctacgactaccacatcctgggtatgctgggcaagaagattggggagggaatccctgtatttaccggtcttcccggagagactatcacgaaggaagcgctcaggaacctgggagcggagctgaacacctccggcgcttacggaatgtatcatattctcggcgtaacaccggaggcgcccgacatggagacggcattcggaggaaaagaaccggagcggaaggtagtcatcaccaacgacgatatggcggaaattcttaaggagatttccctggaaggcaacaggcccatcgatttcgttatgttcggatgtccgcactttacacttgaagaagtaaagcatatcgcagaaaaaatcaagggaaagaaactggaaaaagagatgtggatactgacctccagcctggtaaaagagatggcggagcgtatgggattagacgagattatcacggaagcgggcggcttcatcgtaccggattcctgtccggaccagccgtgctggcgccacctgaacggcaaaataggcgtgacggagtcaccaaagtgcgcatattatccgcagagaagaggaatccatttcgttatccgcgatctggatacctgtatcgatgcagcattaacaggggaggtaaagtaagatgaaaaaatacagttgtcataagatatcagagggctgcgcagaggcagaagcaatcgtgtcaaaggaccatatcatgttctatctgatgaatccggagacaggggaagtaattgagaaagcgcatgatctggaaggacggagcgttgcaaagaaagtcctgatcttcccgggggaaagggaagctcagtggtacaggcggatggtttataccagcttaagatgaaccagaacatgccggcggcaatgattgtccagtatccggagacagtgcttgtatcgagtgccatcatcatggaagtgccgatggtggataaggttgacccggctttttatgaggatgtaaaagacggagacagaatcaaggttgacgctgataacggaattattgaaatattatagataattcaaaagagggtagaagagttctgtgaaagagaatttaaggaggatgtacgatgaaaaaaacaaaaaaggtaattgccctgggactgacagcagtgatggctttgagccttagcgcatgcgggggaagaaatgcaggaaaccagccggcagcaacacaggctccggcagccgaaggaggagaagcggcagatagccagggaggccagaccgctgcggccgtgacaattaagattgggcacgttgaggcggaagaccgttccacacataaggccctggttgaatacttccagaaaccggtggaggagaaatcaggcggcacaatcaaagtagagatatatccgaacagcgccctcggcggcgatgcggagcttacggaatcagttgcaatgggttcccttacggcggctcttccttccacgtccgtattagtggcatattctcctgatttcggtgtaatggatatgccatggctgttcagcaacgctcagaatgcatttgaagcgatggacggagacatgggcgattactttaaccagaaactggaggccgtaggaatccactgccttggttattcctacaacggactcagaagtatgacgaacaacgtacgtccgattacaaaaccggaagatttgaagggacttaagatgagagttatggagaatcaggtatttattgatttcttcaacacacttggcgccagcgcgactccgatgggattcaacgagctgttcacgggccttcagcagaataccgtagacggacaggagaatcctccgtccctgatttacgcaagcaagttccaggaagtacagaaatatctgagcgttacagagcatgttaacaacttccttggctttatcatgaacaaggatttctacgacggcctgacacaggaacagcagcagatcgtcacggatgcagcggcagaattcgtaaagcagcagcgccagatggagctggatgacacaaacctgtatgttgacaaactggaagaggaaggaatgcaggttaacagactgaccgaagaagataaagcagcgttcaaagaggctcttgcaccaatgtatgagaagtacaaaggcgagtttggggaagacgtattcacaatggctgagaaatacgagcagtaagtacgaatgttaaaggagctttagtatggaaaagaaaagtatactgtcacggattggcaatatttataacaatcttgaagaataccttctggttgtcagccttgttatcaacgtgctcctggtatttttgcaggttataatgcggactgtatttaaaaactcacttacctggtcggaagaactgtcacggtatatcttcatctggcagatttggctgggagcaagtattgcactgaaatataatgagcatatcagagttaccctgatttattctttccttaaaaataagaaggtgcaggcggcgattggacttctggctgatctgatatggtttttgttttgcgcctatatggtggtaaacggaaaagacctgctggtgtcgatggcggcaagaaaagccgtttcctcgggactcaggttaccgcttgtatacgtgtattccgtgttccctctggcctcatttcttgtgtgtgtcagaatgctggggcattgggaaaagacgtaaagaagttgtttataaaaggtgaggaaggggaaatgccgcatgagtgcagccgtattatttggtagctttttcgtactactgctcctgacagtgccgattggatatgccattggtatttccagcctgattgcaatctattatttttcagatattcctctgattattattgcgcagaagtcaatcacaggggttgattcattcccgcttctggcgattccgttctttatgctggcaggaaatctgatgagcagcggcggcattgccaggcggcttgtaaatttctttgacgcgttaatcggccatgtaacaggcggccttggcatggttacgattatcgtatgtatgttctttgcggcaatatccggctcggcagttgcaacggtatccgccgtaggagcatttatgattcccgagatggtggatcacggctataataagcccttcagtgcagcgctgactgcggcggcggggaccatcggcgttatcattccgccgtctatcccgttcgttatttacggcgttgtatcgggcacctcgattaccgatatgtttacagcgggctttatgcccggcatcatgatgggtgcggccctcatgattgtctgttactttgtatcgaagaagaacgggtacaggggaaaagaaaaggcgtccagcgcgaaagagatatgggttgcctttaaggatgctttctgggcaatcctttcaccggtcatcattcttggaggaatctattccggtttctttacgcctacggaggctgcggttatctccgttgtgtattccttcatagtcggtgtatttgtatataaagaactggatgtcagaggggcgtacaaatcattcaaagacgccatagtggttaatggcgccacgacatttatggtcggtttctccactgtatttgcggcattcctgacaatggcgcagataccgaatatgattgcgcaggcgattctgggactgacggacaatgcgattctgattcttttgattatcaatatcttcctgctgattgtcgggatgtttattgacaatattcctgcaacaattattctcactccgatattactccctatctgtacgggagtggggatgcacccggttacctttggtattatgctgacgatgaaccttgcgattggattctgcagtcctccgtatggaattaatctgttcgtcgcatcttcgatatccaaagtttctattgaggatttgacgaagaagattataaagccgctgctggcattgattgcggtactgcttttgattacttacgtaccgatctgtaccacaatcttcctcaaatagtaaaaaagctgtaaaatactgggaaaaaggcgcctgccatactggacaggcgcctttattaatagtaaaatggtttcaaatattatgtagacaaggaattttataaatgggcgaacagaacattttattaaaaaaaacacagaagccgagttatgtgcagagggcgtatgacggaatcagaaatctgatcatagaagaagagatcagtcccggagagcttttaagcgagaatcagctggcagcgtatctcaatatgagccggacacctgtcagagaagcgatacgccgtcttcaggctgaaggatttctggaatccagaaagggtctgggaacctttttgaaaccattgacgacaaaggacgtcaggaacatttatgaagtcaggaaggctatggaattaatagcctgtgaaacttcaatttatcagataacggatgaagagatagaagcggtgagagccagcctgatgtcgctgcttgcccggcatgaggctggggaagagatagataggatggagttcagcaagctggatggacagtgtcatgatctgattgtacagaaatccaataacggatacataaaaatactgatggatcagatttatttcaatgtcgatcgctacaggattatctctttccacgtgtccctcgatctggaagagagcacaaggcagcatctggtcctattggactgcctgaaggagagaaatcttgagaaattaaaggctgcactcagcgagcacctggactggtcgctgagtcttctcttcaaacatctggagctgtaagaagcggaaagggacagaactatgaaaattgtaatattggatggttacataaagaatccggggatttgagctggagccgctatgaagagcttggtgctttgacgatttatgacaggacaccggcgaatgatacgaaactgattatggaacggataggggatgcagatgcagtactggtgtccagtgtgcctctgggcagagaggtgattgaaaactgcccgtctatccgctatatcggagtattgtcaaccggatatgatggagtcgatatccaggcagccagggaacggaatatccctgtctgcaatataccaacgtacgggaccgattccgtgtcccagtttacaattgcccttctgttggaaatctgcagccgcgccggccatcacagtgatgctgtgaaggcgggaagatggggacagcagccggatttctgtttttgggattatcctctgattgaacttgcgggaaaaacgatgggtgtcatcggatttggaaggattggccagagaacggccgccatcgccgccgcattggggatgaagatactatataacgacggtttcagaagagcggagcttgagacagagaactgcaggtttgccgaacgcggggaactgtttgaaaagtctgatgtcatagccctccactgcccgctgtttccggatacgcagggcctgataaacagagatacgattgcgaaaatgaaggatggcgtgattcttctgaacagctccaggggagcgctcgttgtggatgaagatctggccgaggccctgaacagcggaaaggtatatgccgccggtctggatgtagtatctcaggaaccgatatccatggataaccccttctctcggcgccgaactgtattattactcctcatatagcctgggcagcaaaggagagccgtgcgagacttttagagataggggccgataatctggcggcgtttgcggccggaagtccggtgaatctcgttaactgaaggagacagggataaggaccgggaaagttactgttcacacggtttagcagaggaggatttgggtggacatcaaggtcttaaaatattttgtacaagtcgcaaaggatcagagctatacgcgggcggcggagcatttatttctctcccagccggccttaagcaagctgattaagaagctggagcgggagttaaaagtccccctcttcagggttcagaaaaatggagtctatctgaccgactatggcgaacagttttaccggcgtgttgttccgattatctctgaatttgattcgctgtcggcatttgtggagacgatgcattcggctccggttggcagattaaagctgggggttaccccgatgatagcttctctttatgtggtcgatattgtcacaaattttaaccggcagtggccggatattgaattgcagcttatcgaggacgggagccgggcgctgaggaagatgctgctggacgggagcctggatctggcactcggaattaccggcgcttcttttccggacctgcaggacacggttctgttcaaggatgagatggtggtgatagcttctgtggataatccgctgtcccggtatgattcggtgacattcgagcagttggaaaatcagaagtttaacctttacacttatacttccgcgctgtcccatcaaatcacggaacgctgcgtaaaggccggatttctcccgaaggtcaatatatccagctccaaggttaactttatgctgcaaatgacggaatgcgacagagggatctgtattcttccgcgcccctacgccgtgcagagccatctcagccccaaagtgaaaatcatctatctcaaggagacgtttccctgggaggggaccctgatgcagaacgggaatacatataagacatatattgtcaagctttttgaacggtttgtagtccggtattttgaacagagggaacagccccaggagaaaacggaaatttaataacaggaagaaattagaaagaatttttggaccggaaatggttcaaagattcttttttaattaacagcaaattcttattatgactaaaagttataacttaaatgatttatagatcgtgtacttataaagtgtagtaatatattatgtaaatacagatttaactttacttaatatggtataattcgtgaaaaactttacaaggaggggaaactcatgaaaaaaacaggtattttagttcttatgatggcggtattgacggccacgctcagcggctgcggcagttcggggagtgctgcggcatcaaaggctgatacggagtctcagaagtcgtctgcgggggaagaaggcgcatcgggagaggcggcgattgaagcgacagatctcacatggggaacaggcacactgggaggcaccatccagcttatggggacggcatgtgcttctgtcctgcaggaaaagatacctaatatgtctgttacggtacaggctaccgggggctcgatagagaactgccgccttttggcgtccggagatattaatatcggccatacgacacagatgtatgatgcctacgtcggacagggcccttttgcggaggatggcccaaacgacaagatcctggcattgatggacttatacgatgtggagagtgtggcgatagtccttgataagagcagtattcagtctttggaagatctcgaggggaagacagtcgttctcggtccgtccggctccggtatcgcttcaatggccacggcacttatgtcggcttacggttataatgacagcaactgtaaaatgctgaatctggccaacgatcaggctgtcgatgcattgaaggacggcacggtagacatgatctggggcttctgcagtgcaaaagttcccgcctcctatctggagtctctgtacacgacggtggactgccgggcgcttcctcaggatccggaaaaaattaaattggcctgcagtgagagcaaagactttttccagtcggtgattgccggcggtacactgccatttgtggcggaagattatattaacatggcagctcctgcggaacagtttgcgtctgctgctatgagtgaagatgtagcctatacctttgtcaaaacaatctgtgaaaatgtcgatgccctggcaaattattatgccccggccacctgcattaccgcggaaaatgcacttcacggcctgccgacccaggttccgatccatccgggagcagcgaaatattttaaagaggccggtgtatgggatgatgcctatacggtcggccagtaggacgagtataaacatctgaatatcaactttattgaaaggcctggactctgtagctgcggtgcccgggtctttcattaacaagagaaaggacttgggcatggagaacaagataagcaaaattgcaggtaaaatttttccggttgtggcttttgctatgagtgtttaccatctttggcaggtaatgatgccgtcaatcgatcccaccaaacatatggatattcatctcgcttttgcactgtcactggtatttcttagcgcgatgattataaaagatgataagcattccggccgcacatgtttgtctcaaatcgcaagcatctgttttttgattatggcgctggtatcaaccgcctatatatttgtgaattttaacgctttattaaaccgggcaggccggtacacggggatggataccatcattggctttattctgattctcgccgttctggaggcgacaagacgtacatacggtctgctgcttccgggattggtggttatctctctgctatatggtcattttggaaaatatcttcccggcatctttcatcacgcgggatacagctggccgaggctgatagccagtgtaacgacctatctgtatggtatttttggaacggtgctgaatgtttcggccacttatattgttttgtttatgatttttggcgggctactggagtccagcggtgcggggcagttcttcatcaatatcgcgattgcccttggaggaaagacacgttccggagccgcacaggctgcagtaatcggaagcgggctggttgggtcaatcaacggaagcgctgtggccaacgtggcgtccaccggtaccttcacaattcctatgatgaaggaccgcggctatgaaccgtattatgcgggagctattgaatcggtagcctctaccggagggatgattatgcctcccgtcatgggagtcggcgcatttatcatggcgggcattataggcgtcccctatgccaaaatcgcactgtgcgctcttcctgccgcattaatgtattacgtgaccacaggaatttccgtacacatgcgtgcgcttcgctgcggatttgaaccactgccggacgaaatgattccggataagaaaaaacttatgaaggaagacggcctctttttccttccgcttctggctatcatcatacttttgatttccgggacatcggtaatgcggagtgcatttttaggctgtgttattcttgttatctgctacattgtaaaaaacagcgtgcgcaatccgaaattcgtcctgaccagacagttttggggctttttatataacggcctgatcagcggggctaaaagtgcgatgacagtagcggcagcctgtgccgctatgggaattgttacgcagatatttgtcatgacgggtcttgcgatgaatattgtattctttatcaaaacattatccggcagtgtgggccttgtggctctgatactaacaatggcagttacaatattgtttggcatgggagttcctacgacagccgcttatgtccttgtggcatcgttagccggcagtgtactggtagaattgggatttgacaaactggccgtccatctgttcatctattattatgcggcattggctaatatcacgcctccggttgccagtgcagccttagttgcctcaaagatagcgaaagccgactactttaagacctcggttacggcgacgaggcttgggctgcctgggtttattttaccgtttatgtttgtatatcaccaggaactgctgttacagggaaatatcatatcgatagtcgccattgtgttctcgagttttgtcggtttgttttgcatgtgtgcctgtttcgagggatttgtattccgaaagctgaacgtaatcgagcggattttaatggctgtctgcgctgtctgcggaatctggcccggaacaaagacggatattatctgttatgtgatatttattgtagtgattggcgggcagtatatgcagagcaggaaattgaagagagcggttagcggacagagataagctccgtttccgttgatattggtaaatcctgctttgaataataacttttagtcataaataaaatgactattatatatttgtattcatgacactgccaatctataataagggcaaaaggaaaacagaaaggggttgttgtatatgaaagcattaattattgatcgtgtttctcctgttattgcaaaaggccttcaggcgctgggggcggaggtggatattaagatactcccgtcggtggatgagcttaaagagatgctgccggagtatgatctgctggtcatgcgggtcgatccgaaaatcggcagggatatcctggatgcggcggcgaaacgcgtaaaaatgattgccgtgtgcgcagcgggaacgaaccacattgacctggaatatgccagggaacttggaatcagggttcaaaacgctccgggaatcaactgtaacgcggttgcggagctggtaatctcaaagatgatagatttgtcccgctttacgatggaagcgaatcaggaggtgcagcaggaaggtatctggaataaatataagtataccggccatgagctgggcggccatgtcctcggcataatagggctgggcaagataggcagccgggtagctgaactggcgcgggcctttaatatgaaagtggcggcatacgacccttacgtggatgcggcggcaatgaaggaaaagggagctgacaaagcggaaacgcttgaagaattgtgcgccatttccgattatatcagccttcatacgccgctgaccggagaaaccagaggaatgatttcagaaaaagagtttgctcagatgaaggacggagcaattctaatcaactgtgccaggggcggagtagtggacgaggcggcggcgaaagcggcgcttctaagcgggaaactggccggattcagcacggatgtcctggtaaatgagctggccggcaagggtcttggggacaatgcaaggctagagtcggagctgttcggagtaagaggattcacagcaagtccccatatcggcggcagtacccatgaggcatatgacggtatcggagagcatattgtcggcaaggttgcagaatttttcgggctgaactgaggcggctgattccggataccggcagcttcgcacaggcctgcgagtcaagagggaaattgaatacataaggaggagtttaaaatggaagcaagaaaaaaggtgacgctgagctatattttggagaaaaaagcaaacggtgaaaaactggcccgtacggctctgtatgattatccgatggcggttctggcggaggaagccggaattgaaattataaatatgggggattccattgccacggttatgctgggccataagacgacaaatgaggcagatttagatattatgatagaacacgcgaaagcagtccgtgcaggcacgccgagtgcgtttattatgggagatatgccgtttctttcctatcagatcagcgatgaagaggcgatccgcaatgccggacgttatatccgtgaagcaggtatggactgtgtaaaggttgaaggcggcatggagatcgtccatacggtcgaagctttgacgaaggccggtattccggtcatcgcacatacgggcctgaccccgcagaaagcgcttcagcaggggggatacaagacacaggggcgtgatgtgctggcggccgtggaattgattaaagaggtggaagcatttgaaaaggcgggagccatagccgtagtggtggaggccgtaccggcagaggtagccaaaattatctatgagaggagcagcattccgattctgggaaccggctgcgggccttacagtgacagcccgatgattaatttctacgacttgcttggattctatgagaaaaatgcaaaatttgcaaagaaatatgccgatgtccgcggagtgatacttaatgcggtggggcagtttgtcagcgaatgccacgacggaacctatccggcgccggaacactgctataagatgaaggcaggagaggaagagaagctgaaggaaatattaaaggaacagggaatctaatcgttacagttcagccttcgtctaatcggattgggaaaaaaggagtgatacatatggcgtctctgttgagaggagagccagttgcggaaaacgtccgcaggagaatcagggaaaagtgcgaagcattgcagaaaaagggagtcattcccactttgggaatagtacgggtcggcagcagggggaacgacattgcctatgaacggggagcagtgaagcaggcccgggccctgggagtggatgtaaagcggttcctctttgatgagacggtatctattgaagatcttaggcggactctggaagcgattaatgcggatccgggtatccacggctgcctgatattccgcccgcttccgccacacctggatgagatgcagctatcaggaattttaaggccggaaaaggacgcggatgtgataaccgcagcagccatgggacagatggtgacaaggacaggcaatgattttgccccatgtacggcggccgcctgcctggaactgctgcgatactaccggattcccctgaaagggaagagggtgacggttattggaaaggggatcaatgtcggcctgtctattgccctgcttttgctgaatgaggaggctacggtttcagtatgccatatttttacggcgcctgcagaagtgaggcgtctctgcagggaagctgaaataatcgtttcagccgccggctgtgccggcctgataggtgcggaacatgtacggccgggccagattgtcatcgatgtcggcgtaaacaccggagcggacggaaagatatgcggtgatgcggatttttctgcggtggagcctgtagtgcaggctgtcacaccggttcctggcggagtcggggccgtcacatcctgtattctgatggagcatgtagttgacgcggcagttcgaagtgtgcagaagccgccgcagtagctgaatttttccgttacataaaaaatacctgggagaggccgtttttccggctcacccaggtgttttttgttgattttaaatggtggaggagtatttcacttatatattgttagtagttgtatagtaaatacgctgtggtgatttcgtattacttaccaaagtatctttctaataagccctggaatgcttttccgtgacgagcttcatctctggccatttcatgaactgtgtcatggatagcgtcaaggttagcagctttagcacgtttagccaggtcaaatttacctgccgtagcgccgttttcagcttctacacgcatctcaaggttcttctttgtgctgtcagttactacttcgccaagtaattctgcaaatttagaagcgtgctcagcctcttcgtaagcagctttctcccaatataaaccaatctcaggatagccttctctatgtgcaactcttgccatggcaaggtacataccaacttctttacattcgccttcgtagttagctcttaagtccatcatgatatcttcgctggcgccctgtgctacgcctacaacatgctcagcagcccatgccatctcggcatcctgctctttgaacttatcagccggagcgttacataccggacatttctccggagcagcttcaccctcatgaacataaccacataccatacatacaaattttttcattgctattctctccttttctttacatatataaatattagtttaattagtgttgtgtatctcagtaatcgaaaacaataacgataacgattactgatattaagatatcacaacttgtttcatctgtcaatacagatttaaaaaaattttaaaattaccggccggcagcagaagagcagtcaccgcaggtgccatagaagaaaatcgtatgatcctcaatcgttccattgacatgcctgcctgcttcttcctccagcccctttgccgcattcatagagatatccatgatctttccgcattctttacatacaaaatggtaatggggggaagtgtcatagtcaaagtgatcggttccatccccgcaggaaagcttacgtatctcgcctaaatccaccagaaggttcagattccggtacacggtaccgagactgatattgggaaactgttcccggatgctggtgtataaggcgtcagcagtaggatgatccttacgccccatcaggcaggttttaatggattccctttggcggctgtacttaagtgttttcataagcagcctctctttatatgatattaataatagttactgtttatattatgacggataaagccatgtttgtcaaatgttttttgcagtattcatttccaattgaaaaaaggacacgtaaaggtgtcctttttcacacacagctggacggacaggcaggtatcagttgctgggatgcggcatatactggtacatgcacatggcagttttagataccggcatggtctgaagaatgatatgtcctggtccggtgataattgtattaaagaagccttcaccgccgaacaacatattttttgcgccttttacggcctggatatcaatggagcaggtctcactcatagctgccaggtacccggtatcaacaatcatcttctgtccgggagccaggtcatattcaaccgctgcgccgtcaatttcaaggaaagccgtaccgcggccggacagcttctgcataataaacccctcaccgccaaagaaaccggctccagcctttttctggaaaaaggcggaaagctccacaccggcttcagcggccagaaaaccggacttctggacaaccagaccgtctcccgggcgtatctcaaccggcctgatagaacccggaaatgaggaggcaaaggcaatcattccgctgtcattgcgggcagtatagatattctggaacagattttctcctgaaaacatacgaccgaacatttttccgatgcctccgccggaagtggtcatctccatattagggctcatccagcacatggccccgctttcattaaataccgactccccattatcaagagagcagatcacaaccggaagattgccgcctttaatctcatattgcataataacctccttgttagttcagataactatagtaaaaaaaataaatatttttaattatatcagaaaaatggcagagaatgaataagaaatggagatttaactgaggtttggaggacgcgtccggaacggaccatgtccggtgtggtgaggggggctgtctgagtcttccgtccccgtgggaggttgaccgcggagggggaatccggccggaatgaattgctgcggggaccgtttgcactctttggagtgcgcagcagtgctaagctcgtgagggacctcgctaagcaccggcggactcccatgtcccctccgcaattgattccgcctacttccccgggtcagtttttcgccggggacggaacactcaggcgaaggttttcgacaccggacatggtccgttccgggcgctgattgtctccaaccttaaatggggaggaccctgtcgcggccactacgtgtttctggcaagctgatatcaattcttccgcaatttttataaaaggcgcattgaaggcatatcatatttcccgcacatggtagcactgagtggcctcgacaaggtccgcccccgcacttaacgcgtgagacactcagcggccgcaggccagcggacggggccgatacacttggcggagtctttcgtcccggcgaaaaccttccgggagaaggagatactgccgacatcttccggctccgccctgcgaaaacaaaaccacagtatctccttctccagccagcgatgccaaacccccgggacgaaagactcatacacacaccccaccaccccgtccgctggccgtaccggcggcgtcctcacctgcttaactaaatctccaattccgctggattgaagaaagacgaggtggtataatgtacaataagcaaaaaacagtgccctatagcggaactgagctgctgatatatgccatcccaaattccaatcaaggaggaaccggaatgagtaaaaaacaaatccgccagattatcaccgatctcaccgaaaagctgtgccgcaaagattttcttgagaaatccggcttaagcaagaaaaacattttgatgttaatgaataaagaacactgggaagagcagttaatccgtcttattcctattaaaaagcgggtatcctgccgccttgtctttgaaatctgtgaagaaccgctggccctgctcggcagggagccggaagagggctggatgaaattcacataccagtatgcctgccatattctgtatcctgacgcagaattttctaaagaaacggacagattttcagcaggagctttgttctatctcgaaattctccagtattttttcaatatggagcgcgagatactgccctatgatccgctttacgatttcggctttctgattgatgaggaggccggtaaatttgagacctatgaggaatacaaacggttaaaacaaactttcattaaagaatatatctatgagatgatgcgtctgaatgccgatgtcactccctttaggacgctggaacatatcgccggagtccattatgtggctatgaccgtgggacgcggcctgtgggaggccggagttcccatcgatctggcgctgacatccggggccgccgccggccatgatctgggtaaattcggctgcaagccgaatgagcgcgttccctatctccactattactatacaaaccagtggtttaacaatcactccatggaatatacaggccatatagcggccaatcattctacctgggatttggaaccggagaacctgtcggtggaatcgctggtattgatttactcggatttccgggttaaacagagccggggagaggatggcagggagattacttatatttccagtctcgatgaggcgtttaatgtcatcttgtccaaactggacaatgtggacgagacaaagctgaaccgctaccgcttcgtatattccaagctgcatgacttcgaggattacatgcgttccctgggagtggatgtggggctggacggccatccggtaaaacgggcgccccttcccgacatttcgctcagaaatacggagcagaccatagagtctctcgtttttatgggaatagaacataatattgaaatcatgcaccgcatggcggcggaacgccagtttggaaatcttctggaggcggccaggagcgagaagagctggaagaatgtccgcgcctacctgaatatttttgaagaatatttcacctatacaaacgataagcagaaagaacagacgcttgggttcctctatgagcttctcatgcacagggaaggtgatatcagggcgcaggcgggcaagctcctgggccacgtgattgcccggtttaacgcggggtaccggaaagagcgtccggccgatatgccggacatcgccgaggcacgggtgatggagctttggaatgaatatcttgagatgattatccgtccggatcacaagctcacagtccagcagaaacgccgtatccgttacaacctgaaggtggttctggattctgtggtggagtatgcgggagccgcggatttccatcattttctccatgcatttttaaaatggtatgaacggggggaagagctggagccgggggaggcattcgtactgttggataccgtgcatttcatgccgtttgaacttttcagtgaagaggaactgggcagggtcggaagattcgccatttatgaggcggattccaaagaggcggaagtgagaattgccgcatggcgcgcattcaaactcatcacggcatatcagccgtcccatccctgctgtaaggacatcgctgaatgcgtgatggagacaacggtggaaggcgatattacgatgaccttccttcagtaccgtgtgttaaataatcttggatacgatacggagcttcagcagaaagcgctttacgaccgcgatgtggtttccgacattttcctcgataacctgaagacatccacgccctggattatcaaggcggtcaacataaaacttctggtggatcagattgatcatggaaaatatgagcatatactgcacattgccgcccatttttcaaatctgatcaaagtgagtgagcatgtggttgtccgccatgacgccggccatgccctgcttcggattattgagctgctgaccccggatcagagaaatgagatctcggtcgagctggtgaagggcctggaagttggagaatatgaattttccaaatatattccccgctatctgggagaagtggcactgtggctgccgaccgaacagctggacgaaatacttgtgtatttaagcagcctgatggccagcccgaatgacagaatcgtatcggtggcgctcgatacggtgggcatacttttggagtgctatccctgttaccgggagcggttcatggatgagaaggacggctgggagtgccggagacgcagatttctgggaatgcttctgaacggtctcgccaattacagggagacagtaagccaggaggctcttcttgtaatcggccagacggtgtttggttcaaagcggctgacctgcagtgaaaagaatgaaatattctcactctgcttcagaaaactgctgtttttattaaatgaaaataaaggggatgagctgaccgctttctaccgtgcggccgctctgtccaatatctgccgtttcatcacggaataccgtttgacggaaggggattttacaataggcgaacggaatgcggtggcattcttcccggggacgtttgatccgtttactttgtcgcataaagaaatcgtacgcgaaattcggaatatgggatatgaggtttatctggcggtggacgagttttcatggtccaagaaggcgcagccccatctgatccggcgccagattgtcaatatgtcggtggccgatgaatttcatgtaaacctgttcccggatgacattcccgttaatattgcaaatccggcggatttaaagcggctgaaggaagtatttgccggcagggaagtatatattgtggccggaagcgacgtgatagccaacgcttcttcctataaaaaggaaccatgtgagaattccatccattcgatgaaccatatagctttccgccgtgtcggagatgtcaggtcggataaccggtttaacagaaaaatgatggagtccattacgggaaaagtatatgaactggagcttccggaacacctggaggacatcagctccacaaaaatcagggaaaatatcgatatgaaccgcgatatttccaacctgattgatccgtctgtccaggaatatatttattacaacggcctgtatctgagagaaccggaatacaagccaattatccgggccagggcaattgtatttgaggaaccggggagccggatgaggcgcttctgtccgagatttcagagtcggtactgcgggatgaggagcacagggcccagataatggaatcaatccgcgctgcgggtgacaacctgcttctgctgagaaatacggtggaggacaaccgcctggtgggagttgccaggttccgctatctggctccggatgagctgtttgcagtattgaaaaaggtagatttggcagatctggtccgccgccacacttcaggggaaattcttctgatatcgggaatccatgtggaaaaggaaccggcgatttatgatgcggagcagcttcttctggcggaggtgatcgcccgctccttcgcctggaaatgcggctatgccatatttttcccatatgagggagtctgcccgaagcgcgtaagctcagccattgaacggcagggtttcgttaaggcgccggaattccaggaggatgcgcctttgttcctggtggatatgcatgcgccgcttctgctgatgcagaatctggagacaacgctgaaggaaccgttttccagcaatcccagggtattaaaagccatttacaaagcgcatcatgatttgcagagaacgatgacgggtctgtatccggggcaattggttctgtcactttccgcaagcctgatatatcaccggcttgtagataaaataactactctgaacggggtgccgagagaaccggtggagccgagaatactgggtgagtatatgtgtgttcccttcggcaagattctgagaggaaaggtaatacctaatacggtgacaaaaacactccataccgataaggtatttgacccggaactgaaggaagatgccattgaagcattcccttactattcccctctgagcagccagataaaaggaatcaaatcctttgaccggcctgtaatcctggtggatgatttactgcaccggggaggccgttttgaggctctggaaccgatgttcaaggaagctggggtggagatcaagaaagtgcttcttggactgatttccgggtatggacgcgatacgatggcgacaaagggagtggaggcagacagcgtttactttgtgccgaaccttaaattctggttcgtggagtccacgctttatccctttgtcgggggagatacggtccgccgtgatacggtacaggtggccggcctgactccatccattaatatgatactgccctatgcggtgccgccgctgaaagactgcagcagcgattcactgtttgaattttcggcctgctgtatcagaaatgccagggatattatgctggtcctcgaggccgaataccgcgatctgtttgcaagaaacctgactctcagccggttatcagaggcggtcattcttcccctctgcccggataaaggggactgcgtaagctatgatccgaacctggctgcgtcggtatatctggaaaatgatctccagatgctctaccggacaaaaaaggcggcggggcatgagcatgacaggtagagaagcattttaaagaaggaggagaaaaatgtactattacaaaatagagggacagctctgctgttcactggacggcagcctgccgtatgaaaaaacagaagccccgaaggaggtgacctctcttgtatatctttttgacagggagccgggaagctgccgcgcatcgtttaaggtcaatgattcctccatgctgtttgctgaaaaagaggattcttcatggctttgcagcgtgaagctggaagaggcggccggggggaaaaaggctgacgagtggacggaaagcgtaattagggcaggaaaaatgcgcgccgtgaacctgcgtcatcctaaatttatcgagatactcagggaaagacaggagggcggcaaaaagcgcgtgaatgtgctggcaatcggggatgtggggagtacgcttctcaccggccttcacctgctgggcggcgatgtgataagctccatcggaatctgtgatatttccgataaagtgacggccagatgggaatttgaggagaaccagattgcatacccgtgggattacgacgcccttccggaaatagatatcgtgagtgcggaggatctcttcaaatgcgacgtttttgtttttgtggcctccaaagggattccgccggttggttcaggagtcaaggacgtgagaatgtaccagtttgaaaacaattccaaaatcgtggcccagtatgccagacaggcaagaaaagaaaattttaaaggtctttttgccgtcgtgtctgatccggtcgatccgctggcaaaaacggcctggctggagagcaataaggatgacagcggtgttctggattatcagggactccgccctgagcaggttcatggattcgggctgggcgtcatgaatgcccgggccgcatattttgcaaaacgtgacgaacgctttaaacggtttctgacagaaggccgctcctttggcccacacggtcaggatctggtggtagcggattccatcacggattataatgatgaactgtcgaaagagcttacggaattaaccgtgacggcaaatcttcatatgagggctatcggcttcaaaccgtttatcgcccctgcttattcctcgggagccatttccctggttctgatgatgcgcggagaatggcactgcggctccgtcttccttggagggatctatatgggtgtaaagaaccggtataccgcattcggccttgagacagaggttctgcctctgccggaacagctctaccgtagaattgccgcagcagaggataatttaaagaaaattgtataacctgatgttcagagagagcccggcgcttttggcagacgaaagcgccgcggactctgcatagaaagcgagtcgtgccgtaagaaaggaagcgtgggtgtgaacagttcggatatcattgtggttaagctgacggacattgagagcgcacagtcggggcgtctggagggcgtgctggatgtagcgcttaaagggcgttctgtctatgagattcacagagcggaggaaatgacgtattttttaaaagacacagcaggcggttcaaagcggctgctgtttgccgtttccctcgggaaaaccggaattaatctggaatattacagagtgattcaatttctcagggaacatccgggtatgctggatggctggacaggcggaattatcgtagatgccgacagtgaactttttaccaaatctgcagccagggaacttacctttacggctaacttcgccggctgtacttttgtgggccgtcctctggtggaaggtacaagttccctggcgaattttgccatcgtagcccagaatatggatacggatttaatgactgcttaccaaaagagcgccgggcttctggtccgggagattctggattttaaaaatcccgtgtatgaatgtccggatctgctcgtcctgcacgcatccagccatcagacatccaatacatttgccgtatggaatgcggtgagggaaaaattggaaggttttcatattacggaaattgggcttagaaacggcactctgtccgactgctccggctgcccctacagaatgtgtctccacttcggggagcagggaagctgcttttacggcggggttattgcggaagatgtttatccggctgtgaaacgggccaatgccgttgtgatgctgtgtcccaattataacgatgccctctcggcaaatatgacggcatttatcaaccggctgaccgcattgttcagaactacgagattttatgacaaagcgctgttcggcattatagtctccggttattcaggcagtgatatagttgccgaacaattgattgccgctctcaacatgaacaagacattttatcttccgggaaattttgcgatgatggagacagccaataaagcgggaacggcgatgaagctgcccgggattgaagcgcggattgaaaagtttgccgccaatattactaaaacgctgaaaaagaggaaatggaatgaaacataaaaacaaaaagcgcctctggctcctgcctgtcctgattctgctgtatctggctgtgggggccgtttttcccttccttaattataaagaagtaaaggagggaaccggtctgctgccggaacttgcatcaatggtggacggaaagcaggatgcttttgttgaccgtgcaatgattcttgagacaaatctaagcgcctgggaggaacgtctccgtctgataaaccaggcggaggagcggattattctgtccacctttgatatgagggatggggaaagcacgaaagatcttcttgccctgatcctggagaaggcggatcagggagtaaaggtgcagataatggtggacggtttttccgggctggtcagaatgacgggaaggagcctgtttcatgccgtgtcgtcccatcctaatatcgagatacgccattacaacccgattaatttacttaaaccctggaaaacccaggggaggatgcacgacaagtatgtgattgtagatgatatcggttatattctcggcgggcgcaattcctttgattactttataggcgaatatgacacggaacacgggagtctggatcgggaggttcttgtatataattcggcacatggcacaaacgacggactgagcagctccctttatcaggttgaaaattattttcagggcgtctggaaccttgaagtgacaaagccgtttgccgacagtgaaaaacttgaggacaggaaaagcgttgccgaaaagcgggagatgctgagaaacaggatgaactccctcagaaaagacaatccggagctgtttgccagaccggattatgaaaagcagacctatgagacggaaggcatctgcctggtaactaatcctaccgggatatacgcaaaagagccggaggtattttatcagctgacacagcttatgaaagcggccggaaaagagacagaaatccataccccttatctcgtatgcaatacatatatggaaaaacgcctaaaagaagtgaaggaagccgtaccggatatgaaaatagtcctcaattcggtagaaaacggagacaatttctttgcatccagcgactatttgcgcagaaaaaaagacctgacggctctggaaatccctctttacgaatatgacggagggatttcgacccatggaaagtcctttacactcggagacgacatcgcggcagtcggttcctataattttgacttgagaagcacatatctcgatacggagctgatgctggtaatcaaaagcgaggggctgaccagagaactcaaaggtcatttcgatgccatcagggaggattgccgcagagtagtgaatgcgtcggagtatgagacgccttctcatataaaggtggctgaaatcccgggatggaagaagctggccatgaaaataacggggattgtgatggcgccgttccggtttcttgtgtagttaattaagcaggtgaggacgccgccggtacggtcagcggacggggtgatgggatggatctatgagtctttcatcccggggaagtggcattgctggctggagaaggagatactgcggtttttgctttcgcagggcggagccggatatcattctctccggctccgccggaagatgtcggcagtatctccttctccaggaaggttgtcgccgggacgaaagactccgccgggggtatcggccccgtccgctggcctgcggccgctgagtgtctcacgcgttaagtgcggggcggaccttgtcgcggccactcggcgctcccgagcttagcattccgatgcgcactccaaagagtgcaaacggtccccgcagcaattcattccggccggattccccttccacggccaacctacccacgggccggaagactcagacagactcctccaccacaccggacaaggtccgttccgggcgcgtccccccaacctcagttaaatccctatttacagaccgcccgaaaagaagtatactaaaaatagtgtgttgtcactttttatcataaaaaagttcaaaggataagacactttatggccgttaggaggacattacgaatgaatacagttgagatgaatatgaaactgtggaagcggacacttgcaataggagtgatcattgcccttgcctctcagctctactggaatgtatttgtaaataatttccgtatttctacatccgttattctgcttcctgtcctgattatgacggtaggaatccaggtccatacaagaacgatttgttttgtaacggcctgcactatctatatattccgtctggttatactgctgttccagggaatgccgctggaaacaggcctgattcaggtactcccgggagcgctgttctatatctgctacggactcatttttaaactccagatcaagaataagcatatcgttcagatggaacgtctgattgtagcggtctttttctgtgacttctgttcaaatgtctttgaagtctccctgcaggaatacctacaacaaagaatgctgccggaactgtccgtcatcaaatatctgctgatgatagcggctgtgcgtacgctgtttgcggccgttgcgctgattggagaaaagcagtaccgcgttctccttaagaatgcggagcatgagaaccggtaccagagactgtttcttatgacaacggggcttaagaatgaaatttacctgatgcataagaacacagaggaaatcgagagggttatgagcaacgcttaccggctttatgagaagactctgatgatggaggagcttccgaaggagatgcagcagatggccctcgaaattgcaagggatgtccatgagataaagaaggattacatcaggattattcagggaattgaggaggaaatcgatgaggagtatgatgaggaaaagatgaattttcaggatcttcttcagattctggaggcgtccacctatcacatgctggcagagaaaaggctggatgtgcgcctcgtgtatgactgccaggataattttataaccaaagagcattatatattgatggctgtactcaaaaacctggttaataatgcaattgaagccattgaaacaaaggagaagagcggtacggtatgtatcgcggagcgcaaagaggggaacgactatatatttgaaataaccgacgacgggccgggaatttcagaaagacagctttccaatatttttaaaatggggtattcgacaaagtttgacgaaaagaccggaaacatttaccgtggagtcggacttgttggtgtgaaaaatgcagttgaagagcaatttaaaggtaaaattgatgtggaatccgagaccggtaaaggaaccaagttccgcatcatgataccggctgagatgttagaggagtcatgatatggaaatttatattgttgaagatgacgtaaccgttatcagtattctggaagatattattgaggacaatgaactgggaaccgtctgcggtacgacagagggcgggcctgccaatgtggatgaaattctggcgctggagccggatgtgattctcgtggatttcctgatgccgggcaaggacggcgtggaactggtcagggaactgaaggaaaagggatgcggcgccagatgcatcatgatttcccaggtttcggccaaagaactggtcggaaaagcctatgatgcgggaatggagttctttatcagcaaaccgattaatataatagaagtgaagtctgttatccagaaggtggaaaagcagattgagaacgagaagaccttgtccaacattaaaaaaatgttcatggctgagattgcggacatgcccaaagaaaagaaacccgacgacggttacggccggaaggtacagtatattctcaacaggctcgggatgtccggggaaaagggcggtgatgatattatgcgtatctgccagtatctgcacagcaataagcggccgatttcccaggtaagcatcggccagctttgcgagattttaagcgacgcccctaaaaacatggaacagcgaatcaggagggcgattgccgtgggaatgtccaacctcgcccatctggggattgaggattttatgaatgacacattcacatcctattcaagcaccctgttcccctttgaggagataagggctgagatggattatatccgcggtaagaggaagtacggcgggaaggtaagcatcaagaaatttatagacagcctgatgctggccgccgaccgggaaatctgacagacaccggatttcaggccggacatgcagctcaatatttcgggtaattctaaagatgctataaacaaagttaaaaaactgttataaatttttgaatatattcttgaattattttgtagttttttgagagaagtgatttatactgccttcaacgtaaacaaataatctattggaggtagttgtatgaaagttattgagcttgatatgtatcaggcaaccgcggttgcggccattgttcttttactggggcgtatccttgttgacaagattgcgattctgcgtaagtattgtattccggcgccggtagtcggtggatttatctatgcgattctgcatctggttgttagaagcgctggaattcttgaaatctctgcagacatgacgctgaaaaatgtattcatggtggcattcttctgtagcgttggttacacggcatccttcaaaatgctgaaaaagggcggtattcagaccatcgtattcctgctccttgccgtggtaatggtaatattacagaactgtctgggcgcaggccttgcatctgcattcggccttgatccaagacttggtcttgccacaggttccattccgatggtaggcggccacggaacagcaggttccttcggcccgatgctggaagagctgggcgttgccaatgccaatgtagttgccattgcttccgcaacatttggtcttgttgccggctgtgcaatcggcggacctattgcatacaataaaattcataaatttaatttaaaatccgcagctttagatacaactatcgaagagatggttgaaaaagacgaaacaggtgctattgactctaaacagttcctggatgccttcctgtatctgattattgctatcggtgccggcaccgttgtttccatgttccttggaaagctgatgacattcccattctacatcggcgctatgctggtaggtgctgttatccgtaacgtaatggatgccatgcagaaagaaatcccgatggaagagatcggaacactcggcggctcctgtctgtccattttccttggacttgccatgatcgatatgaaactctggcagcttgcagagctggcgcttccgctggtagtaatgctggcagcacagacaatacttatgtttgtatacgcttactttgtcgtattcaacgtacttggaagaacatacgatgcagcagttatgacaaccggcttctgtggtttcggaatgggtgcaacaccgaacgccatggcgaacatgcaggccgttacaggacagtacggaccggctcctaccgcattcatggtagttccgttagtaggaagcttattcatcgatttctgcaacgcttccatcctgacagcatttatcaatttccttggctaatcaaatagacttaccaggcggtgaaaggtctgctctgcaggcttttcgccgctgtacggcgtaaagcccgtctccaggtgcggaattggtaaaaaacaccgcatttggggaatataaacaaaatctaataacaattataatgctaattcaatttgcttatataagtgaaatgcgttataataaaaccagaacagaaaatttcacaaaaacaataggaatcgtgagggaattttgttgaagttatacataatatggttccagtgagtagtgaaacttttaaaatcatatatcaaacaggaggtatattacaatgagcaagtatgttgacagagtaattgcggaagtcgagaagaaatacgcagacgagccggagttcgtacaaacagtagaagaggttttatcttctttaggtccggttgttgatgcacatccggagtatgaggaagtagctcttctcgagagaatggtaattccggagagagttatcgagttccgtgttccgtgggaggatgacaacggcaaggttcatgtaaacacaggctaccgcgttcagttcaacggcgccattggaccgtacaagggcggcttacgttttgctccgtctgtaaacctttccatcatgaaattcttaggctttgagcaggcattcaaagacagccttacaacacttcctatgggtggtgccaaaggtggttccgacttcgatccgaacggtaagagcgacagagaagttatgagattctgccaggctttcatgacagaattataccgtcacatcggaccggacattgacgttcctgcaggtgaccttggtgtaggcgctcgtgaaatcggttatatgtacggacagtaccgtaaaattgtcggcggattctacaacggcgttctgacaggtaaggcaagatccttcggtggttccttagttcgtccggaagctacaggatacggctccgtatactatgtagaagcagttatgaaacatgagaacgataccctggttggcaagacagttgcattagcaggttttggtaacgtagcatggggcgctgctaagaagcttgctgaattaggcgctaaagcagttacactttccggaccagacggatacatctacgatccggaaggcatcacaacagaagagaagatcaactacatgcttgagatgagagcatccggacgtaacaaagttcaggattatgcagacaagttcggcgtacagtttttcccgggtgagaaaccatggggccagaaggttgacatcatcatgccatgtgctactcagaacgatgttgatttagagcaggctaagaagatcgttgctaacaacattaaatactacatcgaagttgctaacatgccaactaccaatgaagctctcagattcttaatgcagcagccaaacatggtagtagctccttccaaggctgtaaatgcaggcggcgttctcgtatccggctttgagatgagccagaacagcgagagactttcctggacagcagaggaagttgactccaaacttcatcaggttatgacagatatccatgacggttccgctgcagcagcagagcgttacggcttaggctacaatctggttgccggcgctaacatcgttggattccagaagattgctgatgctatgatggctcagggcattgcttggtaatctgaagaccggcagctattatttaataacaattgcataagcggttgtctgaatgattggggctgctgcattaagtatataatgccgacgcaaggcatgaggcttaaggcagcagccccttgtttaaaataatggaaagcagcagacatacttttcattgcttgtcctataaataactggtataatagcagagtatgaatcttgaaaggagtaattattatgaattgtcttatcattgacaaagtgtacgcaggaattgcagaagaatttagtaaatacatgaatgtaaaaacggctgacaacctgccttccaccaaagagcagttaattgcccagatcggcgatgtggacgtgctgatcatgcgtgtagacccgaagatcgataaagaggttctggatgcagccaagaatctgaaaattatcggtgtatgctccgttggtttaaaccacatcgatactgagtatgcaaaagagaaaggaattcagatctttaacgcacccggcatgaatgcaaatgcagttgcagagctgactttttctaagatgcttgatatctcccgcggaacctttacagcaaactatgatgttaaggtaaaacatgagtgggataaatataagttcgtaggccgtgaacttcgcggaaaaactcttggcgtaatgggattcggacgtatcggccgccgtgtgggcgagctgggacgcgcattcggcatgaccgttgtagcttacgatccattcctgaaaccggaagactttgagaaagagaatgctacaggcatgtccatcgaagaactgctgaaggtttctgatttcgtatctatccatgtaccgctgacaccagatacaaaagatctgttcaatgcaaaatccatcgccggaatgaagaatgacgctgttgtcctcaacatgagccgcggcggtatcgttaatgagcaggatatgtatgaagctctgaaggccggaacgatcggcggttatgcaacagacgttctggagaatgagcttgcaggcagcggccttactggaaatgactctttcgccagcccgctgtttgagtgcgataactttatcgtatctcctcatatcggtgctcagtccgtagatgcatcaagagacatcggtattctgattatttctaagattaaggaagctttaggactgaaataatgctgtagtatcattaatttgaaatttaattctgacattttgacagggatagccggtgctttggcagtccctgtcatttttttgtcatacggtattaaaaacagacatatttttatttatcttcacattaaagttctttctgttttcctaaaaacaacaacggtttttatagtttatttgccataatattttaaaatgtaaaggaaaaattaaaaataagaatattttgtattgtaattggataaaaatacctgtataatgaaaacagcagatatccgttcagattgacgtaaaatagtcaaaatgaagggatgtttaataattcatttaagggaggaattatctatgaaaaagaaattagcacttgtactggcggctgctatggttatggggaccgttttaaccggatgcagttccggaggcggcagcacacaggcagcagctcctgaagcaaccgaagctcctaaggaagcagagaccgaaggcggggcagccgaatctgaggcggccggaaccgttaagggcggcatggaaggcggcaccagcctgaacttcactacaggtggagaccagggtacatattacggctttggcggcgtactttccggcaagataggcgagagcaccagtactaaggttacggcaattacatccggcggctctcaggccaatatcgaggcgatggatgcaggtgacgcacagcttggattcgtacagtccgacgttatggcttatgcttataatggaaccaacctgtttgaagagtacggcaaggttgagaatttctcgacagttgcagcgctgtatatggagcaggttcagatcgttaccctggatccgaacatcaaatccgttgcagatctggcaggaaagaatgtttctgtcggcgcggcaggttccggtgtatattacaacgcagttgacgtactcggcgcatacggtctggatattgagaaggatatcaaaccgacataccagtcgttcggcgacagtgcagaggctcttcaggacggcaagattgatgcggctttcgtagttgcaggcgcaccgaccacagccatcacctctctggcagcaacaaaagacgtttatctggtaggtcttgacgatgaacatatgaacgctctgatcgagtcttctccttactacagcgagaacgtaatcccggcatcggcttatggcacagatggcgatgttacgacagttgcagtaggcgcggttgttattgcacgcgacgatgtatcagaggctgatgtatataacttcctgtatggtatttttgagaatctggatgccatcacggcagcacatgcaaagggcgcagaactgagtcttgaatttgcatcatccgttacggctgttccttatcatccgggtgcagcaaaatactttgctgaaaaaggaattacagttcccacaaagtgatcttgatcttttcagagtgaatggcagctgcggtgggcgtgagcctgccgcagcttttataaaggggataaaccagtgaattatgataactgggcatgaaaagaaaggggagaacgagaatatgaatgacgagaatatgaaagaaccggttccggtacaggatgctgatgtaggtacggccgccgatgtggaagcggtcatgaaaaaatacgacagggaatccaatgtccgtatatgggaaggaataccgttattaatcatccgatggctgtcggtgggtttctccatctactgcatttatgtaacactgttcagcactgcacttccggaggttcgtctgaccactttcctcggaatgattctgattctgggctacctgaattatccgatcaaaaagggggttacccgggtcaactatatgccatggtatgatgtagttattatggtggcaggttcggctccgtttttctattttgctttgcatgcacagcagattatcaagctggcaacccgcgttaccagagatccgatgatggtggtgatcgcgatcattgccgtggtggctctgatggaactgtgccgccgctgtgttggtattcccattttgtgcgttgtcggtgctttgctggtgtacaccttttccaccgtccgtttcggcaaggtgatttatgatttgttttatacgacaagcggcgtaatgaatactccgatcaatgtctgcgccaaatatattgtggtgtttattattttcggagcttttttggaacggaccggaatatcgggtttctttattgatctggccaacagcctttgcggctcctcggccggaggtcctgccaaggttgccgttatctcttcggcgctctgcggcatggtatccggttcttccgttggcaacaccgtaacaaccggttccgttacaattccgatgatgaagagatgcggctataagcccgagtttgcaggcgccgttgaggcggcctcctctacggggggccagattatgcctcctattatgggcgctgccgcattcctgatggcagagtatatgggcgtgccttacgcgacggtagctgtgaaggcaatcctgccggcagtcctttattttgccggagtctatattgcggtacacctggaagctcaaaagctgggactcaaaggaatcccgaaggaagagctgcctaaaatgagaattctgattaagaaaatatatcttcttgctccgcttatagtgctggtggctcttgtatcgaccaatacctacacaatgcagttctctgcatccgtagctatctttattgcaattggcgttggtttgattaataaggataaccgtattaatttaactaaaattgttgatgcgctggaggccggaggaaaaggaacaatcacagtggctgtggcctgtgcaatggccggcctggtagccgggtgcattacttcaaccggtctggcttccaaactgatcacggctattgtggcagtatcccagggcaaaccgattattgcactgttcctgacgatgatttgctgtatcgtactgggaatgggcgttcctacgacagccaattactgtattatggcggcgacctgcgcgcctatcctgattgcaccggaaatcggtatcaacctggtatgcgcacacttcttcgtattctattttggaatcgtggcagatatcactccgccggttgcgctggctgcttatgccggttcggccatagccaaggccccgccgatgaagacggccattaatgctactcgtctggcaattgcggcctttatcgtaccttatattctggcctttaatccggcaatggtctttatcaatacgaatgcatttcaggtggtccagatttgtataacctctctgcttggcatattcggtattgcggcggcgctgaacggcttccttttcggaaaattgaatctgctgtttaaaattcttctgattgcaggcggcctctgtatgatggatccgggcatgatgactgatatcgtaggtttgattctggtaatcggaccgacggcatggcagtatatgagatcgaagagaacagcttcagcataacacacttgagcgtgtctgaaaattcattcccgctttaaagcttaaaaataatggcaatacggcacctgtgcggataagatggtattctgtccggcaggtgcctttttgccgcctggtcctgaacaggccgggaaggtatattaagaattcggtaaaagaattgacagttgtttcaaaccatgttattatcgcaaaatgagcaaggcagaaaccttgagcatgcaggaggcagattatgaagaaaaaattgattgcggcgattgtgctggcagcggcaatgggacttggcggctgcagcggttctggcaggacatcaggaaccggtacgacggaggcggttgaaacaacacaggcggagactgctcagacgacggcagaagagacggaaaaagataccgctcttactgcggatgataaagagaaacagctggaaacagagtataaggctctggccaaggatgtacagaatataattgaagacagggatttggaaaagctgaagaaattggtggtctatccctgctacgtaggggtgggagacggcgtgactgtggacagtgaggaagaatttatggatttaaaccctgacgcagttttcaccgacgaactgattgatgctgttaaaggagcggatttggactctctgaaaatgacggaagccggtctcgcagtaggtgataaatcaggaaagcccaatataattattgggcttggtgaggacaaacggataggaattgtcgggatcaattattagcctgtaacaattcccgggaaagctgcaggcagggatgaactgttacaggcagggaagatattcggccaatttttttaatgaggaattgacaaccagctcttcgggaaagccggtctcttttaatagctccagcgcatagctgtggcatccggcatccgatgcgcagtgtgaatcactgctgacaatgacggacacattatatttacggcagagatcgagcattacataataattttctttagctcccggccgggggaacccggcttcagggagctattattgacctctaacagcacgtggtgttccctggctcccttcaccagtgcggtataatcaagaggaatattggcattgtcaggatggccgatcacctgaacatacggacttttcatcgcattgacggcggcagccgtattttcctcccgcgagcctgttttataacagagatcatggatgctggcgatcccgtagtctacacgttttaacagccattccttcaaatccagcgtacccttatagtcgagaatattcaattcacatcccatgatcagcctcattccaaacagctcctttggaatggatttaaaattacaaaagtacatttcatggctgcttcccggaagggccgggccgtgatcagaggagccgaacagttccatgccgttatccgccgcagcccttgccatttcataaagtgtattgtaggcatggccgctggcaatcgtgtgagaatgtatgtcaaggatatctttcatgttagcctccttcatttccgaacaaaaattatcaaactattaaaaatatatcatacttttcactagaaaactatagaaatatcaggtgggatatggttaaatatacagagaaggatttattaaacaaaatacaaggaggagaaaattatgacagataaaatgacatatggggcggaaatggaagaatcgaaaccaatggggactgaagaagttctggaaacacgggagaatgaggctgaggcgattgagctggcccagacagcggaacctacggaatcaatggatgattatgctgctgaattggaggcatcctttaagaaggtacgtgagggcgatatattgaccggcaccgtaatcggggtatttgaatctcatgtgctgcttgatttgaagtattatgccgagggcgttattgagaaagagaacctgagcaatgatcccgattttaatatgaaagaggagatccacgttggcgatgagattacggcaaccgtacttaagaccgacgacggagagggaaatatcgtgctttccatgaaagaagccaacgataagatggcctgggacagactgaggaccatgctcgaggagcggaccgttgttccggtaaaaattactgagattgtaaacagcggagcgattgcacagattgaaggaatgaggggctttattcctgcttcccgtctggacgccgcttatgtggagaatctggaggattttctgggaagaaccattgatgtcactgtaatcacggcagatgaagagcataataaactggttctgtccggtagagaggcggccagggaaaagcttcaggaagagaaaaaacgcagaatcgccaaatgcgaggtcggcgtaattatggacggtacagttgacagtatcaaaccatacggagcatttatcagtctggagaacggcctgtccgggcttgtacatatttcccagatcagcagtaagcgcattccgcatccgagtgccgtgctgaaagaaggacagaaagtaacggttaagattatttcgacagccgataataagatcagcctcagcatgaaggcagtggaggccaatgaggcgccggaggaggaagtgttcaactaccatgaatccggtgaggctaccacgggactgggagagctttttaaaaaccttaaactgtagtctgaagtactgttcagtaccagttcagccatgatgtattccgcgaggtgtttttgctgcttccttaccgtttctgtgcatcgattggcggtgaaacgggcgcagagcgctcatttcaccgcggcggagcgtgttcctggccgccgaactgttaccaggagcaacctataaggaagttaaaggagagggagccattgaatattcccaaaacatatgatcagcttgaccagtggaaaacggtcatgtttttgtataattccgctctgaaagcgattaatacaaagatcgagattttgaataatgagtttatccatatttataattataatcccattgaacatgttaaatctaggctgaagacgccggagagcatcgtaaagaagttaaagaatgacgggcgtgaagtgacaatccccaacatgattgactacttaagcgatattgccggcatccgaattatctgttcttttacatccgatatttatctgattgcggatatgatagccagacagtcggatataacggtgctttatatcaaggattatattaaaaacccaaagcccaacggttataagagctatcatctggtagtgacgataccgatatacctgagcgaggggccaattgagacaaaggttgaaattcagattcggacaattgccatggatttctgggccagcctggaacacaagatctattataagtttgaagggcatgcgccggattatctggaggaggagctgaaggcctgtgcggacatggtcgatatgctggatgccaagatgttctcactcaacgaggcaattatgaaaatcagtgaggatgaaaaagctgcggagacggcagcggcaaaagaatgatgaaaggtcttaagacaggctaaaaagaagaaagaagtacggggaagatgaaaataagacgggaatttgaggatacgaagcagattttaagcgttaacaacggaaatatttttctgttcgagctggcgttccgtcttttgactcttccccttctgctgcaaatgacaggggcgctggtccgcctggcgctgaacgcggcggggtacagctatgtgacggtgaataacctgggcgcttttttattaaaaccggttacgcttgccgtagtgctgctgattgcggctgtgatcctgactggtctgatgatcgaaatcggcagcctgacaacggcattccagtcggcggcgtactccaggaagataaatgtgttttccatgttcctgggaggactgggaaaaacagcttatgagataaaacggaaaaactggaagctttttctggtaattgcggttcactatatcctgactaatatttttatgatttacagaatactacgccatgtaaagcctttgaaatttattctgcccgggctgttgggcgaaaactggggcaggcttctgattgtggtttttctggcagcctgtgttctgttatcgtttccgacggcctttatctgttttggatgcatggtggagcagagaacattccgggacagtctggagcgcagcaaagaccttctcagaggcagatacgtaaagacttcttttattctggccgcctgcaatatggcggttactgcggtttgtatccttttgtacctgtttgcggtcgtaattgtggcggtctttgcagtccggtttatggaccggagagtggagctggcccttcttttggcggccagggacagaatcgagtatgccctgatatttgtcatcagcatcgtgtcggtggttgtgaactatggggcgctgacagtgctgtatttccagtatgaccggaaagacaagaataaaaaacggtgggattttgatctcagcggccacagcagaagcaggtggatgaacagaagaaacgttctgggcctgctggctgttgtgacggcggtcagtatggccgcagcctttgatgtgtcgagaaacggcagcttcctgaacgaagatttgctttatgaagtccagattacggcgcacaggggaagttccaggacagccccggagaatacgataccggccctgcaggctgcggctgatgagctggcggattatgcggagattgatatccaggagacaaaggacggggtgatggtcctgtttcacgacagcacgctgaaacgtatggcgggaatagagaagagcgtcaaatccatgacgtgggacgaattaaaagatattgacgtgggtacacggttctccggtgagtttaagggaaccacgatcccgacgctggaagaggcgctggaattttcgcggggacacctgaagctgaatatcgaaataaagtatatgggcgcatccagcagccttcctgagaaggtggcggaatgcattgagagaatgggatggacggagcaatgtgttgtgacgtccaccagctacagttatttaaagcgggtcaagaaggcggttcctgatatttatacgggatatatcgtttccgctgcctatgggagctattataaggatgagtcgatcgattttatcagcatgctctccagctctgtgaaccagaaactgatagatgaggcgcacgaaagcggtaaagcagtccatgtatggacggtaaaccgtaagagtgagatggagaggatgaagatcctggggcggataatgtgattacagataatcccctcatggccagggaagtcctgtttggagaaaagaatacggaaaatctcctggcgagaatccgggagatgttaaaatagagtaaggaggatgcagacgatgaaaattgtgcttcagagagtatcaaaagccagtgtatcggtggagggaaagacaataggagcgatagatgacggctttctgatactccttggcgtctccgatacggatacggaggagatcgccgacaagatggttgataaattatgtaaactgaggattttccaggatgaaaatggaaagaccaaccgctcgcttgcagatgtggggggccagctcctggtggtgagccagtttaccttatatgcggactgcagcgagggcaaccgtcccagctttttcagggcaggggccccggatttggcaaaccggctgtatgaacacgtggtggagcggtgcaggatgtatgtggataaggtggagcatggagagttcggagcctatatgcaggtggaacttttgaatgacggaccgtttacacttgttctggacagtgatatgatagtaaagaagaaaaagaattagagcacgtttgtaaattgctttctgtcggctgtgcgtcacacttttcgggagagggcagaaatggattttcaaacacgctctagaccggctgctccgcgtagattgtgaagcaggcggcgctaaattccggatatagaaaagaccgccaagaacggcagaaaagaaggaggaacgtaaagcaatgatacaggaagagaaaacagagctgacagagaaaacagaactgactgccggggagaaggtaaaagaactgcagaaagaactgacctggagctttcccaatatagcgaaggaggctccgtcccagaaggaggaggcgttcgaatattgtgaggcttataaggcatttctggactgtgcaaagacggagcgcgagtttactcaggcagcggtaaagcttctgaatgaagcgggatatgcgccatttgaaaaggggagagactataaggccggagataaggtatattatgtcaacagaaaaaaatccctgattatgacaaccttcgggcagagggagataggcgcgggcgtgcgcctgaatgtggcccatattgattcgccgcgtctcgacctgaagccgaacccaatgtatgagaaggcggagatggcctttttcaagacccattattatggcgggatccgtaagtaccagtgggctgcaattccgcttgccatgcacggcgtggtggtgaaaaaggatggagagattactgacatccgtattggtgaggaggatggcgatccggtcttctgcgtaacggatttgctcccccatctggcggcagaccagaatgagcgcaagctgaaggacggcatcaagggagaagaactgaatgtgataatcggctctctgccgtttagcgcggatgaggatataaaggagccggtgaagcttttggccctctctgtcctcaacgagaaatacggtatgacggaaaaggactttatcagggctgaaatagagatcgttccggcattcaaggctgtggatgtgggactggacaggagcatggtgggagcatacgggcaggatgaccgagtgtgcgcttatacggcgctgacggctgagatggcatcgatagagcctgaatacacaacggtaaccgtactggccgataaagaagagattggttccgttggaaataccgggctggattcagatttcgtgctgcactatattgaagatttggcggagacggcgggaattgattacaggacaattctcaggaactctatctgcctgtcttccgatgtaaacgccgcctatgatccgaccttctcacaggtttatgaggaaagaaacgcctgctatatcaataaaggctgtgtcctgacgaaatataccggttccaggggcaagggaggcagcaatgacgccagcgccgagacgatggcaaagattgtggatatgatggaccgcgaaggcgtatactggcagattggagagctgggagccgtggatgtcggaggcgggggcaccgttgccatgtatgtggcaggcatggatgttgacgtagtcgatctgggagttccgattctttcgatgcattccccgtttgaattggcgtccaagctggatatttacaatacatataaagcgttctgcgcattttataaataggatctttttttctggagccgtttgtggtattatgtctgttatacgcatcggctccagaatgcgtttgggcagatttgcgggacagatttgttaataaattagaaaagaagaggatttttgaatgagaaaatttttaaaagtaggactttgcggcgcggcagcgcttatgatgtttgcaactggctgttcaggacaaaagagtgccaaggacgcctcacaggcggagagcacggctgaaggagagacacctgctgagacggaagagtatgttgccgagggcagcattacactgggtgagtataagggaattcctgtaaccgtgacggaaccgacagtgacggacgaagaagtggatgctcagattcagcagcttttgaattcgagcgctgagtatttggaggtggatcgcgaggctcagctgggcgatcaggttaatattgattataaaggaatgaaagacggagttgcctttgacggaggcactgcggagggatatgatctggtgctgggttccaacagcttcatcgacggatttgaatcagggcttgtgggagcgaaaaagggagaagaggtaactctgaaccttacattccctgacccataccagaataatccggatctggcgggacaggccgtagtatttgaggtaaaggtaaataatgtaaaagaaaaaacagttccggagctgacggacgattttgttgccaaggtttcaccggaagacggaactgtggaaaagctgagagaaaacatgaaagcatttattctggagcagaagcagtatcagattgacaaccagagaaatactgacattctcaacgcggttattgataaatctgagattgtatgcgcaacggacgatgtggataagaactatgaaactcaggttcagtattatacaaaccaggcgtcgatgtacggtctggatttagcaacctatgccagcctgatgggaatggacgaggaaggtttaaagagcgaactgagaaatgtggccagggatatgaccaagcaggagatgctgttaaaagagattgcttccagggagaatatcaccgtcacagatgaggacagagaggctctggcggagcggtatggatatgacagcctggagagctttctggaaactgccgataaggaaatcgttgatgacacggctctgatgcagaagacactggacttcctggtagagaatgcggaaattacggttgcaaagggagacgtggctccggcgtcataaagaaggcaatgacagcggcggttatcatacaaaagcaggtggggaatatcatatgcagatcttattagacagaatccgcaaagacggagtagtgaaagctggaaatgtcctgaaggtggaccggtttttaaaccatcagatggatatcgggctgttcagggagattggcaaggaattcaaaaggcgctttgccgacactgagattaataaaattctcacgatagaggcatccggaatcggaattgcctgtatcgtggcggaatactttgacgttcccgtcgtattcgcgaagaagacaaagacgaagaacatcgcaggggatgtctatacgacaaaggtggaatcttttactcatggaacggtttatgacatcattgtgtcaaaggaatttctgggcgagggcgacaaggttctcgtaattgatgatttcctggcaaacggcaaggcgctggagggactgacagccctgattaaggattccggagcagagctttccggagccggtatcgttatcgagaagggctttcaggacggcggaaagagaatcagggaaaagggaatccgtctcgagtcgctggcgattgtcgacagcatggatgatgaaacaggagagattgtgttcagaaatgaatagaaaagcattgttttttgatatagacggaacattattcagcgagattgagaggcaggtaccgcagagcgcggtgcttgccttaaaaaaaaccaggcagtgcggaaatcttgtgtttattaacacggggaggacagtctgccagacggccgggattcaaatggaagtggaatcggacggtctgctgtgcggctgcgggacatacattacaacagggaatgaagtcatttatgacaggcggattccggcggagcggacggccagacttaaggaagatatcgtgcgctttggtctggacggggtgctggaaggcgtggaaggctgctactttcagcggggagagtccaggatgccgatggtaaaccgcctgatggagctgctgaaggagggcaatgcctatgtgccgctgggatgggaagataattcctatgatatctccaaattctgtgtcgcagcggaccgggaaagccggaagatggaattttttgcgacgattgaagatgagtttgaaatcattgacaggggcggcggtttttatgaatgcgtaccgttggggcattccaaggccacggccgtagaagcggtactcgggagatttggaattgccaaagaagatgcctgggtatttggggacagtatgaatgatttatcgatgttccaatattctctcaactcggttttgatggggaagcatgacagcggacttgagccgtatgctgtcttcacgacaaagacggtggaggaagatggaatcgcctatgccttagagaagttaggaatgctcgggaaggatgattgaaagatgagatatacagtcaggagaattaaaacacagacagcaattgaatcatgtgaaagggccggaatcaatgaggtgcagtggaacggcaggctgcagccggaggcgtgggcctatatgggctacctggagggtaagggcctttttgtcagaatggcctgcggtgagacgaatccctgcagagtgcaggtctaccacaagggcccggtctggaaggacagcgcgctggagctgtttctggcgttcccggtctcagaggacggccgggaaggcgaattgaccaatgagagcctgtacctgaattttgaaatcaatgccaatgcggcaatgtatgcccagtacggctttggacgcaggaacagagagtttataccggatcgtgtgtaccgggaaagcagatgcaatgcggtgatcggaagagacggatggcgcgttgattttctgatcccggactggtatctggaggaagtgacagggaaaaaaacagaggactggcttgcggcagacggtaacaggcctatgtactgtaatttttataagatttcggaaagtccggagatagaacattatatgagctattccagaattgaaagcgggacgccggatttccatctgccggtatattttgcagaggccggatttgagaaataacctgggcgtgcagatggaatcaggttctgtcagaatgcagacggcggaaaaggagattgagattactatatggataaatatcaggtattaaaacagtattttggctatgaagagtttcgggagggccaggaggggctgattgacagtattctcgcaggccgggatactttgggaatcatgcctaccggcgccggaaaatctttatgctttcaggtgccggcattaatgatgaagggaatcacattagtcatatcgccattaatttctctaatgcaggatcaggtatctgccctgaaccaggccggcattcatgccgcgtatctgaacagctccctgacggtaaatcaatattataaagcgctctcttacgcaagagagggaagataccccattatttatgtcgctcccgagcggctggtaacggaggagttccttgattttgccattcacgcagagatagccatggtggtagtggatgaggcgcactgtgtgtcccagtggggccaggatttcaggcccagctatttaaaaatcatggaatttatcgacaagctgccgaagaggccggttctcagcgcgtttaccgccacggccacgaaagaagtaagggatgatgtgatcgatatcctgaggctgagggagccgaatgtcgttacaacagggtttgaccggccaaatctgtggttttccgttcaggcgccgaaggaccggtatgccacaatgaagaattacatagaatgccatccgggacagagcggtatcatctattgtctgactagaaagacggtggaggaggtcagcggcaggctggcaaaagagggatttttggtaacgcgctaccatgcggggctgagtgatgcggagcggaagcgcaatcaggaggatttcatttacgacagaaggagtctgatggttgccacaaatgcgttcggcatggggattgataaatcggatgtgcgctttgtgatccattataatatgccgaaaaatatagagagctattaccaggaggccgggcgggccggaagggacggtgaaccggcggaatgcattcttctgtacggcgggcaggacgtggtgacgaaccagttctttattgacaataaccaggacaacgacgagctggattttgctgccagggagcttgtaaaggagagagaccgggaacgtctgcgcagaatgacgtattactgttttactaatgagtgcctgagggattatattctccggtattttggggaatacgggggcaattactgcgggaactgttccaactgcttaagccagtttgagacggtggacgtgacggaggtggcagaagcggtcattggctgtgtggaggactgccgtcagcggtatggcgtgaatgtaatacttgatacggtgcggggagcttccactgcgaagatcaggcagtaccggatggacgagaatgcctggtacgcgaagcttgacaaagttcctgcctttaagctgcgtcaggtgatgaattacctgctgctcaatgaatacctgcgggtgactaatgacgaatatatgcttgtcaagctgacggaaaaatcacagtcagtccttatcggtgatgaacaggtgattatgaagatggcaaaggaacagattccggccagggaaaagagcgggaaaaagaagggcagaaagagcattgccgcagtccccggcggagcagagtttaccggggtggaagaaaagctgtttgaatgcctgaggacactccggtttgagattgcgaaggaggagaaagtaccgccatatattgtattttctgataagacgctgtcccatatgtgtattgtaaagcctgagacaagggcggagatgctgcaggtatcaggcgtgggtgaatttaagtatgagaagtatggggaacgttttttggcctgtgtgagagaaaatatggagatttagttaagcaggtgaggacgccgccggtacggccagcggacggggtggtggggtggggttatgagtctttcgtctcgggggaagattgttgtggtatggggctgcgggcgaagataaagtctgcggagcacactcccgctctgtgaaatgcatcgcgctgctaagctcgacaggacctcgctaatcagcgatggatttcaacggcatccgccgactttatcttcccctccgccccaaggccaggttttcgccgggacgaaagactccgccgggggtatcggccccgtccgccggcctgcggccgctgattgtctcacgcgtgaagtgcgggggcggaccttgtcgcggccactcagtgctaccgtgtacgggaaatacgatatgccttcattgcgcctttataaaaggcgctagatttggtatctgcctgcggaaacacgtagtggccgcgatagggccctccccatttaaggttggagacaatcagcgcccggaacggactatgtccggtgtcgaaaacctccgcctgagtgttccgtccccggcgaaaaactgacccggggaagtaggcggaatcaattgcggaggggacatgggagtccgccggtgcttagcgaggtccctcacgagcttagcactgatgcgcactccaaagagtgaaaacggtccccgcagcaattcattccggccggattccccctccacgaccaacttcccacggggacggaagactcagccatccccctcaccacaccggacatggtccgttccggacgcgtcctcccaacctcagttatatctctttatctaaagtgttaaaaaatttgattaaaattgtataaatgtacagattttaacttgtgatagaccgggatttttagtataatataggtgaactacaaggagacttcattcatgaagggggcgtttttatggagaacaaatatgtaaaaatcaaaacagcaggaaccgatgtcgcgctgaaagttatgccgggacattatgcaaccaaccacgcccatatcaattattacattgatatgaccacgatgaagaccagaaccagtgaggcacaggagctggctaaggatctggtcagcatgtatctctatgacacggtaatcgatacgattgtatgcatggaagagacggaagtgataggagcgtttctttcggaagagctgacacagggcggatttctttcgatgaatgctcataagacaatttatgttgtaagtccggagtttaataataacagccagattattttcagggagaacctgataccgatgatccgcgggaaacacgtgatgattttgatggcctccgttacgacgggccttaccgtaaataaggcaatcgagtgtattcagtactatgacggtattctgatgggagtatcggccatattcagcgctatcgacgagatgaacggtgtgcctatcaaggcagttttcggcaagaaggatctgccggattatgaatattccgattacaggaactgtccgcagtgtaaagccggaaagaaattggatgctcttgttaatacattcggctactcaacaatcagatagcagagcacaattgtatagagatagaaccaggcagacggaagcggtttccgtctgcctggttttttagcctcaattaatcattcggcagtctgcgcgagctttgctgttgtgataacggcggatgttccttttactttctcactgtccaccaggctgattataatgaagacggctccgcaggtggcaagcataaacagaccgatgcttttgaatacaggagtcagcgccgggactatattccaggcaatgattgagacgatggatgtcataattgtccagaagcccgctttacggctggaaaatccgggaaagagaagccctccgataacgataaaggaggttccgatcgccagggacaaagccttctgcatagcatccaggattgcacccatctgtgtcgcaatcaggtaggttataatactgctgaggacaacgattactttatttacaagcatctttttgctttccggaattttgttgcagtttaatttatatacgatatcggtgctgaccgtggtggagagtccgataatcatggaacagccggttcccatatccgcagcccacaggccggagagggtgattccgccgagtatggggggaacactcatcaaaatcatcggcagcgccatggacgcggaagcgtccggaagaagcgctctgccggccacgcctaaaattgcgcatataaaaccaaccggaaccatcagtaaagctccgaaaatgaaaccgtttctggctgctttatcatcttttccggtaaggccgatctgtacaacgccctggacagaatttgtgttgcccagcatgacaataatccagcttataatgccaatccagcccattcctgcggttaaactgagataaggtacatcaggctgtgccgctgtgagcgcttttatggcagtccagcctccgtggccctgtaaaaccagaacagcggccaggacaacgcctgcataaatcagaatgaggttgagtacgttggtcagggatacgcttcccattcctccgattacggcaaccagcataaaaatcagaaaggagaaaaaggtaccgctttccaccgtgaagacgtccgggagcagagaggccaggatagaaccgcctgctttgtactggagggcaatgatgcccgattggatgatgcacatggcaattaccatgataaagctggttttctgtccatacaggtcgcctacaagaccgctgatggtggagtagctgctttttcgcagatatttcaccgccagtacggaggatacgacggctccgatagcccaggctgtgtcgtaccagccggcggacagacccactgtaaatgcattttctgcgattccgatggtggacgcccctccgatggcaaggcctgagatgctggcggccacaataaaggtattattttttcctttatagattagaaaatcatttttgtcctttttctgtttccgggagacataaatgctgatcccaaataaaagcataacgtataatattacgattatcagaggtatattcatggtgatactccttccggctggtgccaggctatttttatatgttgctgcagagctctgcatattcttcttttaactgcggcatgacactgccgccgtaagggatgatatagacatctttatttttaaaatccacctttgacaaaagagtgtccatatccttaaaggactgtacctgcatatcctttatcaccccgggctccaggccggagaggagaagcgtacgggctttgcggatagattcacaggcagcataaaagatatatcccccgatagtgaaatcctttctcagggcttcatcgaggcagccgtttttgagaggctcgatccagtcaaagaagtcttttgccccgctgccctccgagcaggcggccagcagaatcagggttcctcccttttttaccgccttcgccccgttgaacagcgatttagtggactggtaaaaattcagatcctttggaaatccgccgcagcttacgattacgacgtctgcctcataatcaatcggcagcccgtaggactgctgtacataacggcagctctccttccacgccttgtcaaaatctccgcagaaaagtccgctgtgcctggaggcagaatccacaacaatattgattccgaatgtcacatgaaccagatcggcggcctcgcacatatcctggtgaatcggattaacgagaattttaccgcttccgattcgggaatcggatttcggctgttccggatccagcgccatttgatgattcatacgtatggtctcacgtgatgcgattccgggaactatgctttttctgcccccgccgtaacctgccatgatatgatggaccgtaccgccgatgctgataacttttctgcccaccgccaggggattgacactgacctttgtgccgaaggaggtggtgccgacacagacgaggtcgggggagtcacagtcgtggtcggttacgctcacatgatcatatacataggctccggccagtttcctcttatcctcctcggaattcatacggtgtgttccgagtgcgattacgaccgcaatctgttcaaagggaatattcagcgtatcatgaagatattccaccagaagctggcagagaatatcctggcgcatccagaaacgggttatgtcactgatgatgattgtgacatcatcctcttttgcgattagctgatttaagggtttggtcccgatgactccgcctgtgatacagtggtggaattccgcctttatatcatcaattacccgcattggattctcgtggagataagcgatgcttttggcgccttcgacggtaaaatccacagttgacgtgccatattttaaatgtatttgttccataatagtttcctttcctgacaggcagtcttttcggctgctgattctgataatgcaatacgtaaaagttttgaactttaaactactaaagtttaacactataacaggattctgtcaataaatttgatgaaaaaatcaaatcttgacaaagcatttctgatcacctataatcagattggacactggatacaattggataccccaataacaatatcaggaggtatcacaatgagtaatttaactgtacggcctatcaataccggctttgtgacgatgatcccaaagcagtatctttaccaccattctacggtggcattctatccggaggcctctgatcaggaggaagaatatccggtctttacttatcttgtggagggcggtggcaagctgctgctggtagacaccggcatggcttacacagagcgcgccgacaagtatcatcaccatggatcccatcagccggagggaatgtcgattgtggagcagctcgcagctctggggtataaaccggaggagattgacattgtcgtatttacccaccttcactgggatcactgcttttatatggaaaaatttacaaatgccgaattttacgtgaataaaaaagaatatgaatttgcggtgaatccgattccgctgtattttaaatcttacgaggctcccgaattggggattaccaggccttttgagggaattgcgatgaacctggtggaaggggataccgagataatgccgggggtgcgcgtgttcgagacacccgggcattcggtagggcaccagtcggttgagatcgatacggccgtcggaaggtatatctgctgcggcgactcgatttttattatggataatgtaaaaccgatagaggagcttcactacgacatcacgcctccaaaccgtttttccgatattgtcgccgcatggaagagcatagagcggattaaggagcgggcggaaggcccggataagatactgacgtgtcatgacagggagatgcttgtccgtgctgccgtgacacctgtgcttggattggaacgggaaggcaggtgaaagaagaagtcggaaagacttcgaattatatggcggtaatcgcggttatagcatgctgtgatactaaatatcacgaaatttcatttgttcgggaaaagataaaaagaagcggcaatgtgccgctgatactggacatcagtacgggacccaacattcccatggaggcagatatcagccgggaccggatcctggagaacggagggtatacctgggaacagattcacggcttcgacaaaagcggggccatctttgcaatgacagagagtatatcgaaaacggtgatgaagctgtaccggaatgggaagatggacggagtgattggtatgggcggtctgcagaataccgtagtatgctccgccgccctgcggctgcttcccatcggttttccaaagataatctgttccaccattgccagcggttcccggtgttttgatacggtagtgggggataaagatattgcggttatgccgtctattgtcgattttgccggcatgaatcccatcagtgaagcagttctcggcaatacggtcagcgcaatgattggaatggtctcccatgggagccgggggattgacacaaggggggagatgtatatcggcgccaccctgatggggattaccaatgataccgtgatgcaggcctccaatgaactgacggaacatggtaagaaggtaatcagtttccattccacaggaataggcggtaaagtgatggaggatttaatcagggaaggaattattacggctgtgatggatttgtccctgcatgagctgacggcggagtattttggcggctacggatacagcaggggagcgcaaaaccggctgtgtgcggctgctgaaatggggataccggccctcgtctgcccgggaggaatagattttgcctgtctgcgtacggacgaactctttgaagacggggagaaccgcggctatgtatggcataataaggaattgacccatacacgtttatatgaaaatgagatattagatataacaagaaccattgtagagcgtctcaaccgctccgcgggaaaaactgaagtgatacttccgatgggcggtctgcgcacgctcagttatcccggggaatttttccacaaaccagggacgattcagaaaatgaaggagatttttgaagagggccttaaaccggaaatcgtattcaaggcatacgatttgaatttttgtgatccggagtttgcccacgtctgcgcagaggaaatgatggggcttttaggagtttaaggataacagttcagccatgatgtattccgcgaggtgttttcgctgttttttgcgaaaatcccgagttatgcggcgcgaaacggcgtttttttgccgtttctgtgcatcatttgctacagtttggccgaaggctgaactgtaacgtttaaggggaaaggagaagagatgctttattcagaatatcaggggccggcacaggagatgcagaaagcggcggcaaaattctacgctctccgctaccagatgagcaacggcggaaatttgagcgtgcgcctgcctggaagagatttaatgctggtgaaaggaacggatgttgcttttgatgaggtggggccggagacgcttgcagtcaccggctttgacgcagtggcgtcagagggcggtatccgtccttccaaggaggcgctgcttcacggcgccatctacagagcgtcagagggagtcaatgcgattatgcactgccactccccctatgcgacggcctgggctgccgggcacgatgaactggagttttccacataccattccaaactgaagctgaacggaagagtgccggtttttgacacacattcctatgcggttcccacagaatactttccgcagattctggactttattgcccgaaatcccggagccaatgcatttctgctcagggggcacggccaggtgacgtttggaaggaatatgagggaggctgcctatttggccgaacttgtggaggaaacggcccagatttctatattatcatcaggaaaataagcaaagagcccgggaaaccgggctctttgcctgtgggcgcatgtccggccggaggcgccagacggctgaattgttacagattttatcaggaaaagtttacatatgcgccgacactgttgaccacatctttcaggtgggccgagatagcttctttcgtcgctgcaatatccctttttctcaatccctgcacgatacgcgtatgttcggagagcgtgtcattgaccctgccttccagggaatagtagattgatttgaaagaatcgcatttgttccagagtccctcaagaatctctaccgtattggtgcagcccgacagtgtacagagcagggaatggaactgacggtccagctgcataaattcttttgaagtattggagaaactgagcatgcgcagattgatcgcctcaatggcgttaatctcctcatcggatgctttcatacaggtacgcgtggcgcagtattgttccatcagtatcctgacctcgtatatttcgttcagattttcacgggaaagctggaagaccacggctccgcagtgcggcttggttatcagaaggccctccgcttccaggcgctttatcgcatcccggaccggtgtgcggctgactcccagttttttcgtcagggtttcctgggcgatatgttccccaggtttaaaatcgccctgaataattgcattctttatccaaagatagacggaatctgaaacggttgtatattggattaacggcgtgttattctccatgaatggcctccctcatcgtaattacagtattttccagagataaatataccccaaaaaacggcagttgtcaatggattggataatgtatccaaaatataagcttgttattgtgaaatatagataaatataaaatgacaaaataaaagtttattgacaaattatacaataagatgtacaatgtcactatgaaattgtatccaatatccggtgtccaacggaatggaaacaaaacatcgtgaaggaaaagagatatttgcaggttggaaaggatgggaaaaatgaagaaaaacaggttatttgcattgggaatggcggcggcagtggcggttatgtcgatgacaggctgcggaagcaaaaattcacagactaaggagacagaaactccggccggacagggtgattccacagcagcggctccttcaggcagcaaggagaaaattaccctgagaattggttcgggacattcggagtcgaatccctggattacggcgctggaggattactttgtaaagaatgttacggagagggtcagcacagagacaaattatgagatagactgggttaaatcctatggaggctccgtaatttctctcggcaacgagctacagggggtgcaggacggactggtggatatcggatgtacgattctcgtattcgaagcatccaggcttccgcttcaggatatggtttacagcatgcctttctcctgttcggatcctctgattgtcgcagagacggtcaagcagatgtatgcggagtatcctgaatttacctcgacctacgagacggattataatcagaaattcattgggatcggcgtttcagacccatatggcttctacagtacaaaagaggtaaaatccctggatgatgtcaaggggatgaaaataggagcggccggaattaatctttcctggatagaaggttccggagcggtcggcgttcagacgtccctgaacgatacataccagaacctccagacgaatgtatgccaggcgacaatccagccgacgcattcctgtgtaaacttaaaggtttatgaggtggcgccttattatctggatgcaaatttcaatgtggttccgtttaacgcgatcacagtcaatatggatacatggaatgacctcccggaggaggtacgcacgattctcaccgaggttggcgaagggtacctggattacgaggcaaattatattaatgagattcacgagcaggatctgaaggagctggaggctaagggctgcacgattgtcacattgagccgtgaagaacaggaaaaatgggcggccagccttccggatattgtgaatggtctcgtaaagagcctggacagcgcaggatacaacggagcagaaattgtggaaaaatattatcagattctcgaatcccacggggttgagaggatccgcgactggaatattggaaactgacttaagaaccgacagaaaagaattgattaggggagggggaactcatgaccattctgcgaaggatagacaggatgctggaacgttttctgggtattatggatggaatcgcatctgtttctatttttgtaattatgattttaatcaccgcggatgtacttagccgtctcatatttaataagccgtttgtgggaaccgcggagattgtatcgagtatcattatcatcgtatgctttctggagattccttatgtggcggttaagggagcccatgttcggaccactatgctttatgacaaggtcggggcgaaggggaagcttataatcgatattctggcggcgtttcttggaatattggtctactcatttattatcagggcaagctgggggaatctgctccacgcgatcagcatcggtgaagcggagatcgcgggttccttccgcgtgacgacggtaccggggcggtttgccattattttcggctcagcgcttatgattcttgagtttatcgatcagattgtaaagtacggttacagcctgctgacaggcaggagtttttatggagaagggggagtgtacagtgagtacaggtgttgtagcggcattttcattaatcctgctgctggcattgattttcagcggcgtacatttgagtacatccctgatgtttaccagtacactcagtgtattcctgtttaccggccggttctcgacggctatgaacgtgctgagccagtcggcatgggggcggtcaggcagtatatgttcggcgtgattcccctgtttgtgctgatggggcttctggcgaacctgtccggagccagtcaggacttatatgattcggccagtcttctgcttaagaaggtccgcggaggcgtcggtattgcaacggttgtggcaaatgcgatttttgctgccatcacaggcgtaacggtagcgtcggcagcagtcttcacaaagatagcactgcctcagatgctgcgtctgaaatatgacagaaaggttgcgcttggaactatctccggttctgccattctgggtatgctgattcctccgagccttttgatgattgtttacggctcccaggcggatgtctccattggaaaattgtttgtggcggcagtttttccgggaatcatcatgacaattgcgtttgtcatcgtgattttgacggtagcccatttgaagccggattatattccggaggtggagaaattgacggaggaagagcagaaaaatttctggaagattgtcctgcgtccgtggccgattgtactgttgattatcgtttcgctgggcggcatctggtgcggctttttcacccccacagaggccggcggtgtaggagcattcggagcttttctgattgtagtacttaaaaagaggtttaacaggaaggacttctgggagactctgctttcggcaggctccacatcgggaagtgttttaattctgctggtttccgcatcgacctattcaaagacactggcaatgtgcggagtgattaatgtgatcagggatttcgttgaaagcctgcatatgcctcctatcggggttgttttactgttcatcgtgatcctgatgattttgggatgtattcttgattccacctccatactccttctgacaacaccgttgatgtgtccgattatggctgatttggggtacgatttggtgtggttcggcctgattatgataattgcgattgagacaggcatgattacgcctccgtttggcatgaacgtttttacggtcaagtcctccctatacgggatggagggagtggaagacattacggtcaatgagattttcgcaggctccatgtggttccttgtggctattattatcgtcgatttgctctgtgtttttgtgccgcagattgtgctgttcctgccgaatgctatgtaatccgcgtattcttctttgaatacaccggcgtatgcaggcagatataaaattcaatttaaaagagaggggttattgatatggcagattttaaaataccaaaggataagacggcaattgtattaattgaaccgcagaatgattttttgagcgagggcggcaccatgtatgcccatatcagggaacagctggcagagagacatgtgattgcaaatcttcaggaactgttaacccaggccagaggcagggtggcaaaaatattttactgcccgttccatccctttgatcccggatttccggaactgaaaaaaggcggtccggcgtgcgagggacttcgcgggattgagatggatatgaaggcagactggggaaccggtgcatggcttcggggaacgcctgggccggagattatcaaagaactgacgccgcagccgggagacgtcgtggtggagggcaaaaagacgctggatgcattccactccaccgcccttgattattatctgagggcaaatgagattgagtatgtggtgtttaccggatttcacacggactggtgtgtcgaatcatccgcccgttcggcctatgataaaggctaccgtgtgattgtaatcggcgactgtaccgccaccgatacacaggaagaacaggatttctgtgaaaaatggattttcccgaagattgggaagctgatggggtatagggagtttttggaagcgcttgagtagacaaaatgaccagcttcggctggccattttgtctaaacggcggggaacaggcaaatgtcagccggatccgatagtcctccgatgtctcctccgcctcacaacatcctcccatctcctccatcatttcgcggatattgcggacaccgattccggtgctttcagcctgggtctggttggccgactttttattttcaaacaccaagccgcagccgtccgtctgataaaacgattcgatccggatcgggtcaccacaggaggcatattttatgatattggagcagatattgtcaaggatcctggttatgtatttcgaatcggcacagatctccctgtcctcccaggccagggatggacggacctcaaagcctttctgctccagacagacgcacaactcggaaagggagtcgtagaaaacggaacgaaatggttcctgcctgagagccgtgggaccggcggccttgttcagaagggagtatttcaggatacagtcggccatatctttaatctgatgtgccttctcatctattttcagaacccatttttgcatctgctttctgtctgcatcgatctcattttttaatatctccgtgtagatgagaagcgcggtcaaaggagtgcgcagatcatgggagaggccggtgatcatggactggttgagacgtatcagttcggcttcctggctgatcttgtcacggatggattcgcgcatgctgtccagcccctttgccagaaccgccatctcatcgctgccggttactgtgatgcggtaatccagatttccgccttccagaatcccgatctcggcgctcagcgtcctgatatatttcattgtacttcggatacctgccatgataattccggtaaacaggaggaaggagaggagaaattcaacgatcagggcataattaaagaattggtatgtatacatgcctgtcaggaagacgagtgcctccccatcctgaaaatcaatcatttcataaccgttccattcgtagaactggcccgttacatgatactccggattggctttcatataggggaactgcgagtcgtaaagcagaatgtgatcgcggtacatctgcatccagacgacttcctgacggcggacccattcagccagcctgtccgtgtcttccgtggacaatttgtttttctttacgtaatcccgcagatcattgtatctcctcgcattttcccgctccatataatttgttttagtaaaatagtaatccagaagtttctctccgccctgattgagaaggaggaaaaaaagagcggcggtcacgaaggccagggccagaagtttcagaaagcggtaataaatcgaattcgttttaagtgttttatctttaggcatcgaaccggtacccctttccccagacagttgttatcgataccggattctgcggatttttctccactttttttcgaagatttctgatatgcaccatcacggtggcattgcatgaataaaaatacggctcactccagatgctctcatataaattctgggctgagaagatgcgttttggatactgcatcataataagaagaatatggtactcgatatcggacagattgacctccgtaccgtcaacatatacctcattaaaatcctcattaatccggaaacggccggactcgatgaagtgttcctccggctgtgatgcttcgtcttctttgccgcggtagatatggtatcgccgaagctgcgcctttacccgtcccagaagctccgcgtaggagaacggcttggtcagataatcgtcgccccccgccatcaggccgatcagcttatcagattcctgggcttttgcagtcaggaagagaaccgggacaaatgatgttttccggatttcttcacacgtctttaaccctgagattccgggcatcatgatgtcaaggattaccagatccgtatcatctgacagaagccgtaatccttcccagccgtcggcggcctctgtgatttggtaatcttcactttccagcaggatccttatgccctcccggatatcttcatcgtcttctataattaaaatatttgcattacccatttcgctttcctccgtcagtagtgccgggaatctggaaagaaattccaatagacacccgctcattataccatattcaattgttacttttttcaattttttcttacattttagggcatacttcctacaaattatttactttagaatcattaaaaaaggttttagaattgattaagattttcccggtatgattaaattatcctgaaaacgggattgccggtatgctccgaaatgcgaagcggtccgaaccgatctcaggaaatattaagaattcaaaaaaaggagtgtgcttttatttatgaagaaacaaacgaaattagtcgcaatactctctacggcagcattacttgccatgggagcttccatgacttctttcgccgccggctgggagaaagatgattctggaatctggcattattatgattccgatgacaatatggttaccagtgagtggagaaaagatggtaccagctggttttacctggatgatgacggcgatatgctgacaatgtcctgggtggacgatgagagctatgtgaatgaaagaggtaagaggcttgtcaattcctggattaaggttccgtccgacgacagcatcgatgatcccggtgaagacggtgatcactggtattattttgacagcaaaggccgcaagctgacatcaacatccaaaaaaattaatgggaaaacatattatttcgatgaagacggaaagatggcgaccggatggtatgaaaaggacggcaatgtctactatcttggagacgaggacgacggaacccgcaaggataaccagtggctgtggcttgagcgtccgggcaatgcagatgaagatgataatgcggcggccaacgctctcgactgtacggatgacagttcggatccctgtgatgacgagggctggtactactttggttccggcggaaagctcacaagagatactgacaagaagaaagtcaatggccgttactattattttaatgagcatggacagatgctttatgagtggataaacgacaggaaggtttccggagcagctccgggcagccagtcgaatgcggccctggatggaaatgcggcaacgcctggcgcctcacagatagagcatatgatttatgcaaatgtggtggaagagggctggagagcagacggctggtatgaaatcagcggttccgtggatacggagacagacgatgacgaccactggtacttctttaaaaacggaaaggtgaaacgggctgattccgccaaggatgcccgcgtaaaggatgacgacggacttgtttatgtaaaacgtatcaaggttgacagccagaagatgggcaagcagttttatgcctttgacgagtacggccggaacctgacgggactccagtattcaccggacgaccagggcttctattactttaatgaaagcggatacccggtattcggaaaagtcgccagtgtagactgtgacgatgacagctacgaatttttcttcaattccagcaaaggaaagaagggacagggctataacggtgaaaagagcggttatctgtactttaacggtaagaagctgacggcagatgatgaaaacaggctgtatttctacaatgataagatttatcttgtaaacagcaagggcaaaatccagaaaggcaagaagggctacaatattgaaaacagctcgatttccgaggataaggtatcggtagaatttaattccgacagttccgttaagtccatcacactggatgaaggtaagggaacgagctatactgcggcacagcttcttgcaatgtcattaaataccgattcaacaaccagcgactatgtcgatgaagacggcagatatgatgatgcttatgtgacgattccgttcatccagctttacgataataatgtttatacatatcgttttatcaacaagaaagacggcagctttgatgcatctgaaatgtggtacgacgtgcatgaaaaaataacgaatagatggaaataaaccaggtttcctgatatgattgtactctttttgaaatctttttgaacgcggggcgggactcataggggtcccgcttttgtgtgtgaaaaatcatccgttttttttaacctggatcaaggtatgttttatttgtccgctgcatacattgtaaaaacaatgatttcagggggcaaccttttgaaagaatatattgaagagcgggcggtagctatagcgaattacattattgattacaatgcgacagtgcggcagacggcaaggaaatttggaatttcaaaatcaacggtacataaagatgtgaccgatcgcctggagaatatcaacccgtctctggcggcgcaggccagagtggttctggatatcaataaggctgagcgccatatcagaggcggtatggctaccaaagaaaaatatcagcatcagcttcaggcatgcagcagaaaataataatggcagtatcatatccggaggcagttatccggaaacaggcatccgtaatcaggaaaggctgcgttctcacaggaggacgcagcctttcctgattgatgacggtgaactgttcgcggggttgcgggaagaaatacggtaaaaaggtaaggcggcgaaaaggtaataaaaagaaagacttcctaatagaatgataataatcaaaaagaacagggagctttttttatgggaaaaattctgagtggtaagcggcatggagtcattttagccgcagcgctctttctgtcagccgttctgatggccggatgcggcggtgagaaggaggaggcgaaggtccgggatctggaatttacggtcgtggggcaaaatgaggtaccgcaggaacttcaggaaataatcgaacagaagaaaaaagaaccgttcaggctgacttactcgggaggagaagatttgtacatagcagccgggtatggagaacagaaaacgggaggctacagtatagccgttccggaactctacctgacagagaattccatcacgatccgaacagagctcaaagggcctgagaagcaggagcagacgggttcggaatgctcatatccgtttattgtagtgaagatgccgttcatggaagagccggtggtatttaagtaggaaaatcagaagaaacaggatgaacagttggaaagatgctgacgcatttccagctgttcattttgcgtttggcagcagtcggataaaatgctttgcgcaatcattcttatcgtacggcgcccatgccgggcaccgtatgccgtattatttaattacgcctttgtattcaggatgcttatcgaaccactttaccgcataagagcatgtcagaaccgcctttttatcctctgcacataattgctctgcgaccgcgttcatcagcttgtctgccagattctgccccctgagggacgggtctacaaaggtgtggtcgatatttaccgtatccttgtcaatctccgggaaggttacctcggcgagcagtttatcgtcttctccgagtaaagctatttggtttgggttataggtgaaatccatcttcagcctcctttatttacaatgtttttctggctctattatatcttagggaaagaaaaatagcaattatattctttttttacttgcatttcgttaagtcagggtgtataataatataactatcttaaaatcatgctccggataaggaatctattctgaattccagaatgcgaatcgcaggaacttccacagccagtgataattttagaatcgtttattgtatatttttaacttttttctgtttttgcgcatatataagaaaagcaggcattttgcggcaaaaatcagattcatcttactaatatctatatttcaaaaattctgaagtacttctgaaacaaataccaatgagtaattttatgattgaaacaactgacataaacaatgcggcagagaggagggacattataacgaaatacggaatgcttgaacaggcatacagtgaaattacgttttgctggcaggaaacatcagagaaagagtatccctggcagcaggatcatctggcaggagagcaagaactgctgcttgaattgattaatattaatatggaacgtccggtgcaggaagcgccggatacaaaagaacgcttgaggcttggcaggtaccggagatggtacggaatcaggaacaagcggagagccgccggggaggtgcgctgtgaaaaaggggataaaagcaggaggcctgtgcatcggaatattatgctttctggcagtttttttatgccggaaggatgtgtgccgggttctggctcaggaagaaatacagagattttcagatctgtttgatacgccgggagagattccgcagccggaagagtttattaagagtgaatccggccggatatacaggctgaagaagcaggagctgctaacagtcccagttgttggggacacaagaaagctgtcgggccgggcggactacccgggaatcagccggctcgatactgtgccggatacggcggttatgactgtgaaggatgaggagagcgggaaggaatttgaagcagagttatctcttgagcaggttcaatacagcaatgagagatggcaggccggaatttccttcaccgccaccttccatgattacggggcagattactatctgtttggggacatacgtattccgcgccagacggacacgccggagctgtcctcctttcagggggaatttcttaaggcggcgggaatggagccggaggattacaggattgaagaatttctatgggacggggagccttatgaggacgagggaggcgttatatgccgtgacgttctgatattggggcggcagaaggtatgggattgcacggccctttatagtgcggcggtaaagatgcctgattttaagagataccggatgagcatggtgtacggggaggctgccgacggaggggaagaaaaggaggagggggctgtccctgaggacggggacatacctgacggggagactgaaccgggagctttggacaaatggactgaattcctgaaaattatcaaaagaggattacaggtatcggtggggatttttgcaacagccgccgctgcgctgatactgttttggctggtaaaaaaggccggcaggaccggggaggatgacagataagaagccattttccgcagaaaaatgagcggattgcgaatgtttttgaggattgtgagagcacgcagtgcggagcaatccggtatcaaagggtcaaaagaccttttgcccccaacatcatttcatttaatatatataaatgacaagggagatacgcattatttatgcccatctcccttgctgattttatcatcatgcagataatcggatatgctataatatttattttaattaaaacagagacatcacgctgctgataccgattaccagagagataattgccacgcatcctcccagaagattgcggagcagagagtttttatactgacccagaacacgggtgcggcttgtgatgaatacgagtgcgataacgataatcggaaggaagattccgttaacggcctgcgccatcatgataattgaaatcggattgtaacctgttgcagatacaataattccaattacgactacgattatatttgtggcaaagaagcgtttgtctgttttatccattttccatttaaacagtccggcaagtacgtaggaaacaccgagaggtgtgacaactgccgaggaaacgcctgcggagatcaagccgatactgagaaatggcttggaaaagctgcctaagagcggttccagctgaacagccatatctgcggcagatgaaacggtcataccgcgcataactgtgcctgctgtaatcataacggcacctgtaatgataccgccgatgatcatggatatggtaacgtcgaaacgggccagcggcagttcctccgggttatgccatgttttccgggcgctggtagcatggataaacatgttatacggaacaacggtagtgccaatcatggcaacgcaggtcataattgcattttgcggaacgttcggaaccgcgcccatcagtagttctccgagatccggttttacaataatcatggtgacaacgaatacgatagccataacactgacacagacgcttaagagcttttcaagagtctttacggcatcgcctatattaatgaggatcaggacaccgataccccagattggagctacgatgttggaaggaattccggtgagggaagagatgccgatagcggtacccgtcaggtcgccgcccatatatgcaacaccgcccagcacgatagctgaagctacgagaataatcatggcccatttaagcggagggcggtcggagagttctttcaccagttcttctgcaagtccgttctgggtaacgattcccagacgggcagccatttcctgcataacaattactgcgataacagagaaaattacagtccagagaagtgcatacccataagtggctccggctctcgtggcgcttgtaatggtacctgggccgataaaggatcctacaacaaggattcccgggccgagagctttacacttatctttaagagtataggttttatttttttccatgcattgcctccatttccaattaagacggtttatcgaatcagtatagtaaagaactaaaacatgctgaggtataaggtttcacttaactgctccagcatctggataccggccagactgttcccctttttatcaaggccgggtgaatagataccaattcccattcgagtgggagatacggccataatgccgccgcctacaccgcttttggcaggcaggcctactttgattgcaaaatcgccggagccgtcatacataccgcaggtggtgagaattgcattgacaaagcgcgcatggcgtcctgaaaaaagaacttccccggtctttttcccccgcccgtggtttgccagtacaaaaccgatgttggccagatccttgcaggttacgcggatagaacatgcacgaaaatagatatcaaggatttcttcaacatcgtcgtcaataatgcctgaacttttcagcagataggccagcgcccggtttttattgccggttctcttttctgaaagatatacggcctcatccacatcgatttccggatttccggccagttttcttgtaaaggccagaaggcggtcaaaacgctcctcatatgtctcgccgtgaatcatcgagcacatctcaatggctccaatattaaccataggattaatatgctctttcagaatcagctgttctgaataatcaatggcattaaagggtttcccggttgcttccacacctatgtattgtctgacatactccgttgtgttatccatgagtgccattagaagcaggagaggtttgataatgctctgaatggtgaactttttgtcgaagtcgccggcatagaattcttttccgtcgctgttcacaagataaacgccaaaatcattaatatctgcttttgacagttcgggaatgtagtcggccagttttccaagccgggtataggaacggcattcttccaggagacgctccaataattcttccatatgtatcacactcaaccttccttagttaatttgttaccttgacagtaaatgataatatcgttttaataactacaatgtcattataactgaccgttattgcagtgtcaagaaaaattatcatattagtataaattttattgtaatttatcagaaaaacctgtaaaaatgccggagaggcggagaaaaatgcaaatatatccggggaaaatgccgatggaataaggggagacagtaaccgtttatacttctggactgatgcgggaaatagaaaactaaggaagggattcattgcatatttttctaaaatgttgtaaaataaaaccatcttgattttaagagaagaggagcctttattatggaaaaagaagtgcgtctgattcagtcgattcaaagagcttttgatattatcaactgtttcagcgaacagtcgccaaaactgactttaccaaaaatcagcgagatgctttcattaaatattaatacaacaagaggaattgtaaacaccctggtggcaaatggctacctggaacatgacagtgagacgaacatctattcattaggtcctgtttttatcccaaaagcagatttggtcagcgccaatgatatggagagagtgaagaaaatggcaaggccttatctggaggagctttccaatacatttcaggtatcggcgaggcttcaggtggtttccaactacaatatttttacgattgaaaatattaatccggaaaatgcccattatatacttcttacgcggttgaatactacgtttgcattgaatgcgactgcatcagggaaacttttgctttactatatgggagaacgtcagagggagcgttatttcaagacactggatcagcggatgtatacgaaaaatacgcttgtaaccaagaaagatctgcaaaaagagctggacaagatagaaaagtggggttattctacagaattcgaagagatagggctgggaatcagcagtatcgccataccgattatgaagaagacgggaggactttacggtacggtcagtatagtggcttccagttcgattgtcatgccaatcattcaggatgttgtggttcctatgagaaaatgcgcagaatttgtatcggaaaacctgttgctaaaataatgcaggatgcggatggaattatccatgcaaattccattaccataaaaaataaggagaaaattccaggatacggcggaattttctccttattttttgcggagtgcggctgcttatttctgtactttctctgcttttcttgcagccagaccattcataaagtagagcgccatccaaacacctgtgtgagccgacatctgggttccgcaggtttcaggataaatttcaacaaaatcaaaggcattagctccggctctgccgcattcatttaccatcatagccagctcgaaagaggtgagtccgcacggatcgaccggtccctgagggttggcggaggcatcgaggacatcggaacagatggttacataaatcatgtctgtatctttcgatgcaatttctaatgcttttttaatagtagcttcgtatccgttcttcttgatttccatagccggaatgacagtagctccgtatttttctgcttctcttctttcctgcggatgatttctcggtcctctgattccgatatgtacgatcttggtagaatcaaagttttcatcctgatacagacggttgaacggagaacatctggaatagagatcatcgccaaaggacggcatcgtgtccagatgagcgtcaaaatgaattacacccactctttttttatggcgttttgccatctcactgatcattgggtaggagatggagtgatcaccgccaaatgtaatcggaatggcgccggcatcaatgatttcaccgaatttttcgcgcatatttgcgaaggttaaatcataattgccgttctgtacaactgtatcgccgtaatcgcaggcagtcatatagtcaaatgtatcaatatcatagtcaggaaggtaacctgtatatcttgtcgatacgccgcggaacgttttcggcgccacaacacaggatgagaatccgccataggtacatccgccttcccacggtacgcccataacggcaaaatcaaaatttttcacatcttcggccgtcttagctaccggcaggcccataaaagatggaactccactgtaaatttcctgcggcactacgccgggctgataaataattggcttattctgcataataaaaacccctttcatataaataacgaaatttgttaagaaatacttgttattaaaaacgatattataattttgaaaacgatattatcatattgctactgtatcactaaggtgtgaaaatgtcaataggcatgtaatgattttcgggagttttgcgaaaaacacctcacgaaatacatcatggctgagcggatactcacatatactgttattaacgtagaaatgctgaaatcctgccctgtaatgcccgagtgccttgcaacggcataaagattcctgcaaataatcatacagttgaggtggcttatgaaacttttttcaaagaaaagcagtgatatgtcaggacagcatccaggacctcgtctgccggtggcagaaaatgcatttttctggatgttgctcctccttttgtctatcggatgtattacatccttgtatgaaaagtctctgcacaagcaggaaacatcgagtgtttcttcggatagtgtgtttaagagtataaagaccacaggaagaaattaccaaattaaggaaagaaagcttcctatttactgcgtgaagacggatgcccccaaagttgcactgacttttgacgctgcatgggggaatgaggacacacaccggctgatggaaatcctggacgcccataatgtcaaggttacattttttatgaccggcggctgggttgaaaaatttccggaggatgttaagtacatagccggacagggacatgaactgggaaatcacagcgaaaatcataaaaatatgagccggcttgacaaagcagtgattcaaatggaactgcaaaaggtacacgataaggtgaaaaaactaacaggaaaagatatgacactctttcgtccgccttatggagattataataatcaggtggttgagatggctgattctatggggtattatccgattcagtgggatgttgaaacacttgaaatggtagtaaaggaaatttagaagaaggaagaatatagaaataataaagagctccctgccaggagctctttattatttgcaaaattaactaaaaataaaacggaaactaaaactaaaaactaaaactaaaaactaaaactaaaaataataagcctccggtttaccgaagaggtctaacaccctatacataaaactaggttgtgcgccaccttttgaaattaattatagtaaaaaaaagataattttgcaatcattttttagaggagaaataaaaatgaactcagacaagcctaaaaatatgcgaataattaagcctggagtaaatatagaggagtggttactaatgcagcattgtgctacagaggcttatgaagttagagatattgctattacaggagaacatctttttatactctggataaacaagaaacaaaatgtgggttattgtatcggtcatagttacttagataaaagaattactttttaccaaattggataaaggttcaaaaaaagcattctggtgatatgtcaagaactttttgaagaagattttgatatgtttttcagaaaaaagggtaactttaacagaccttcggtatattttacgtataaccgaatgtcagttcgactcaatattatattcggtgtccagcttttcgccggtgtacagttggtttttgaccagcaatccaaaaacgagtcgtactaatttacgagatgtaagcgcgagtgctcttttgtgctgatgtttggttacctcagcatattttctggcatagaaatcagcatattcagggatgtgcttcctgacgctgtttgccgcttcgccaagatagcagcgaagatagggatttccggctttcgacattttgttgtcctcagaagtgaaatctccggaatcacccttaggccagtaaaggccggcatatttggcaagggcatcggatgaatggaacacggttatatcgcctatttctgatagaattccggatgcccatatcggacctattccaggtatggattgaaggatgagcagggcgttagggttcattccgttgatgcatttctcaatcgcctgctcgatcagcttgatttctttctgataggcgtggatgcagttaaacgagcttgccagtgatatgctcagtggttcatacatgcacttgtctaaccggtaggaatccctggctgccttgcgcaggagttccgaagtttttgataggtcagagatgcggttcctgctcttccccgcaaggaaggtaagcagatcctcttccggcatatcgataatctcctgcggagacaaaaattccgtcaggacagctgaggacgtggcaccatagagactgccaaaaggcttgtcatcaccttcaaggagctgaagttcactgaacttcagataaagattcgaaaccatataagtcttctccctggtgatgcactcagaaaggtgcatacggtgccttgtaaggcgtttcagggatatgaactgcccgccgcgccatggctccagttttttcgtgcggcctaccctgccgaagtccgcgatgagatatgcatccgtgggatcggtcttttccattccgatataggattttcggtaattcgaagcggcctttgggtttacacagaatacgtaaggcctgtagggcatgagaacctcgctggccgacaggaagtttgaaatatgcacgctgtatacagaagtagattccagcacgataagaaccgtatccaggtttttatgcttctgcatgcattcggcaatcatatttacaagctgatcggcgcctggctggttattgccaaacgacgatgagatgtatttgttttcctcaaagtccatggcatagacggcattggtctttgagcttacatcaatacctacaaacaaggtggacatatagttgagctttaacatgatatcacctccattccgatggggatttgtgaagcctgaagcaaaaggtttatcctgtgccgcatacggtgaccgaaccctcgcgcaatgagcatgcacccagtcagccttttttgctggggctaacggctggggatgaaaattctgtgtcagcggaatgtgccgtatgtgccaggctgaatgctttcaaagcagtctcggacgaagccggctgaaaggaggagaagcagtgccttcggacatcagactctacctgatatcataccacaggatctacctatattgaaatgtaactatcaactgtatagatgggaatcgggatgaggggagtacctcttagatatccttaccatttatacccaaaaaagaataagtctgtaagcggtttttcttgcttacaaacttattatacgaggaggaatagcatggaagtagaaaagtgggttgaagaattttgtgtggcacgtatcgatgaaatttttcaggagataaatatcgataccaactatgatgaacgaatgaataaaataatgtcttccctttcagaggccgatcaacagtggctagatgatcatttgagagactgttttatgactaatgaagactattataaagaattttatctggctggaatgcgagacattatcacattatggaaatatctacaaaatgataatagtgacctaactccagataaagtcacggagatgaaattaaaaataagtagaccattacaggaagaaagaaaaatggaaaaatatgatattggtattcgaaatggagtacatagagtaaaagtgacattgcagcagtggcaatatgtcgggcatatctggataaacatgggcggtaactgttatggaaaggcgctccttgatttcgattttgaatgtgaggatggagaatcggaaaatgattgtgaacttaaatatcatgaaaacgaggaatggtttaccgctgttttgaaagaccaagatggaaatagctgcagagtagatggctcagcagctgactttaatgacatgattgtagccgtagagattgtttcgtatgaagagaaacgatgaatcgtgattatgaaataggatatgaagcaagatatgagacctgtactcagctttataaaaaacgtgatcttatgcttttgagagacaggtatgttcaaaaagaatgttaagaaaaaggaagagataaataagattacgaggaaagaggagattgcgatgtaccctacacatggagagcaacaaaaaaaggagattgaaacaatccgaaagcgcacgattgaacttgaattatcggacgctgatgtaaagcggattgcggaaaaggcgggggcgcatgggatgaccgtggggaagctgctggaaagttttataggcgaccttgtatgtggaacgtactccaacggatcggacgagcgcgaccttgccggacagtggtttgaccgttgctggttcggtatgttcccggaaatgacttttctttcctggctcattgagtggggcgggatagatgaagtcttgcaagcatgggaagatatcgctgacagcacagagaatataaaaataacacaggaagaactttcaagcggcatcataaaaagcgggcgcggggaaacctacacatggcaagaccttgtacatggtgacggaatccccagttattccagccgtgaggaatgggaagaagagcaacgcggttatattgaacaggagcaagatataatcgacagttgccgggaaactgtttccgaatattggaacgagtataaggaacaaaaaaaggagtaccagccaggaacgcttgatgaagaattaaaaagggtgcttgattggcggcagaattaccaacggattttggcaagcggaaagcagacagaagctattcatttctgcccaatgtgtaggcgaaaattggacgattaattgatgatttaaaggaggaaaaagtcatgaaagcaacaggaatagtaagacgtgtggacgatttgggaagaattgtaattcctaaaaatgtgagaacagagcaaggcataacagaaggaacgcctatggagattttcacagaagacggcgctgtcatatttaaaaaatacgcgacttatttagaggaggaatagaatatgaagtttagagcatgggataaatcggatagggttatgtgtaaagtcgcctatctgaaattaagtgaagtgcagtatatgaatgttggatacagaaaaaacattaatggaaagacaatagatgaaaatgcattacttgatgaaaatttatccgggacctgtgtactgatgcgttataccggaaaacacgacatggcagggaaagaagtttatgaaggcgatgtgattgaaaatcctggcggaatacgaatggaaataaagtatggcttatatgatgcgtactgtcctgctgacagatgcaacatggatagtgttggattttatgcggcaggggtaggattaccggaaatgccaataggatgcctggaggactatgctgttgttgtcggtaatgtgtgggagaatccagaactgcttagtaagcaaaattgacatttaggagagaggaggaattatgtacaaagcatcagaattagatttagacataacagtaaaaactttactagaaagtgaattaggatttttgttatttatatctgataatactgacagagatatgtttagcattttgttaaaaggaggtacttatgaagatagaataggagtgtttggatataatactcatatcacttgccacttatttcctcttatgtatcataaggcgcatgaaaacgactgcgattacgtaaaagcaagagccaatgctcttcacaatgtatttaagcgctggactgatgccgggtataacaaatatcatgcaaaagagccatttaactgtaaaaaatttatggactttataaattcattagaatggagtagggctgattacatgttgcttatggttgactaatatagtagatgaggattttacggagaaccgggagaaaggagaatagtttgaatgaaggagacgtgtggttactgtgatttaaacgaaaccggaacttatgcagggagtggttttttatggggcagagatttaaccggagaatacgacggagagtttaatatcgtaaaatcaaagcataacggaaagcattatttaaagtatgcggatgatgaatctgaaaatacatcagaaattatattattttgtcctatgtgtggaagaaaattggatgaagaaaattgacaattttatgaaggagaaacgaatgaaattaattgaacttgtatgtagctgtacaaatgaaagcagtgattatttagcgcagtaggaaggtgagaacatgttggaattggtaccggtaagcctgaaagaagcaaacgcatttgtggctcgttaccatcgtcaccataagccggttgtaggacataagttttctgtggccgccgctgtcaatggggagattacagacggtacacataatgcctgtagctttttgtatgcggccgcctggcgcgctgcccggaacatgggttataaacggctggtgacatacatactggacacggagacgggaggcagcctgcgggctgccgggtggaggtgcatcggagaagctggtggtaagcggtggacaggattacgacgaccggaggtggatttgtacccggcgcaaatgaaaatgagattcgaggtgacaaaatgaaatgtgtgctgaaatatccaggagccaaaaaccgcatagcaaattggatttgcgaatacataccagaacacgaagtatacctggaaccatacttcggcagcggagcggtatttttctctaaatttccggccagaatcgaaacattgaatgatctagatggcaatgtagtgaattatttccaggtaatccgggagaattgggagaagctggctgcccagctggagatgacgccatacagcagagaggaatattatcgggcgtgtgaatacgacccgaaggaatcagatctggagaaagccagaaagtttgcggttcgatgttggatgggattcggatgcagcaatctatatcgtaacgggttccggagcagccagcaacggacaagtccacatacgacaggtgaatggagaagccttccggaaaggctactggcagccagtgaacgtctcaaaaacgctcaaattgagaatcttccggccgcggaactgattaggcggtatgatacgccggatgtgtttctatatgtcgatccaccgtacctgcacgggacacggaaaaattatctatatcaccatgagatgaaggacgctgaacatatagaactgttggaattgctggtggaacatccgggtaaggtgatgttatctggttatgacaatgacctatataacggaatgcttcagggatggcgcaaggtccagaaaaggacacaggcggaagcaggaataatgagaacggaaacactatggatgaattatgagattggtcaaatgaagttattcagttaaattgacatttaacggagggaaacacatgacaaaaaaggaagcaatggagcgtgcggaaacgcaagtctatatatacatgaaccgtggggaaattgaagaagcgtgcagaagacgcgtcattacagtatcgcgagataggagcaaaatggagcaggctcttatcgaggcattggtggcggaaactgaaagaagggaaggctcaatatgaattttgatgaatctattgcatatgggaaaaatgtttcagctcttattgatttttgtaaaaatatggacacttcgttgctccctacttacaatttgatgttacttgaagaaaaattgaaagaaccgcactatagaaaatcctctgttaaatacggagatctaaaacaaatactaaaagaatttagagaagcttataaaaaataaattactagtatgcagtaactaaggagtatacggaagaatattataaagccgacgagaaagaagaacggaatcggatatacgatgtttaaagacatgtcgttgaagtattaggatagaacttttggggtaggagaaaatagaagattagcacagacgaattaaaaaaccccgcaagtattagcagatacttgcggggccacggtcaaaggctcctccagaagggggaggcgaccatgcaatacataatacagtttcagtatacaatttttgttatgtattgtcaaccaaggattgtaacggcggaaacaagctagattggcaatggggcatatgggtattataaggctgttaatttgctaaatgatttattttgaggcggcgaaaaaagatagggggaggcactgaaaatgggtatgcagcgcatagactctgcttctgagattgatccagggatcattgatttttctaatatttgctgcagatatagaactggtgtagacactaccaccggttcgggggtttataaaaaacatagttatcgccacggcgtaatgacaaaattaggagacatagaaataacggtctggactaaaattgtggaacaactgatagaaaaaaatgatgagaaatggctctttgatgtgctagttaggtgggagactaagggagactatacaaatagaacaagaaaagaattgtggtatttggtactggaattatacacctctcgaatttttgataatccggaatggatagatttcatctcttttaatagaaagtaccgacccgatgcactaaaacaagtcaagatcatcacagtcgtcaacgaatgctgcggacttctcggtgaagtgacgcaagaacaaattaacagcgcttttggaggaaaaatcttctgtccccattgcagtaggcgaagcatatttgaaattataagcaagacagaatctattgattatcatgtaaaggagaatacagatgaaaaaaggagcaacagtaataagtgtaattaataataaggggggcgtaggaaaaacgacatcggtagcggctttcgccgaattgttagcatatctcggctatagaacactggtagttgatttagacgagcagagcaacttgtccatgtttttccactcctatatagatgacaatgaggaggtaatatctggaataaaaaaaccggatgaaatgaacgtatgcgaactgtttaaatatcgctttaaggaaaaggcagaaattcagcagttaattcacactacgcagatcccgggagtagatattattccttcttctaaacgtcatacacgtactgtactcgaattgacgttaaatacggggaataacaatattgtccttaagcgggccttaaaaactatcaaggaggattacgactatatttttctggataacgcacctgcaagcaatattctgaccgtaaatagtatctttgcgtcagactacatcatcacccctgtaaaggtagaacaatacagtttaaagggattgcgcgaaaccctttcaagtattgtatatataaaagaagaacatgatttggaacagattgaatttttgggagcctttatcacccaggccagcataaatacaaatgcatttaaggacggccgtgaactgtttaaggataatttgcaaaataaattatttaaaacccctgttcggcaggacacaaaaatcaatgaagtaaatcagactttacgctcgctttttgcatcaggaaccagcaatgcaatcatcgattatgcaaatctgctccttgagatgaaaatattgacgccggcgggggaagagaaacttaagggatgcctatcagaatagtgttaaaaagaaagcggaggataacaatgggaaaacctaaatttgttaatttgattcataacgtagcaacgccaaccgatgaaagaccagacatgggaattcagggtttattagaaagagataggcaggctgtgagcctaaatggaaaagcagttaatgtaaagttggtcccgcgtgaaaaactgatttttaataaatcaaatgactatgagcaaaaggatatcgaaagtttagcagcgagcattctcatgataggccttcaaaactttccttccggatattataacgaagatttggatcagtacatattggaaaacggtgaacgccggacgcgcgcattggattttctcatcgctaaatataaagattcagttgatttcgaaaatagagattatcaactttatgtaaagaatgtaaagcgatatgaacgaggttatccattgtatgttaattctgtgcttgaagcaggagaagaatttactgaattagaggaaattgatcatcggctaattttaattgattgtaatgtggaaaatcgaaataatccggatgagcggctgcgtcacatacaagaaaagaaggagttattggaacgccggaaggctttaactggaacaactgaaaacattaatcgtacaattgcgcaatctgaaggaataacagagcgacaagtgcagaagtataatgctgtagcaacgctggttccggaacttcaagagctttttaaagagaaggaaataacacttaatgatggtgagttttattccagcttgactacagaggatcaattacgcattgttgatctaatcagatctggagaacaaggctctgcacgagaaattcagcaactgaataagcaactgaaagaagcagaagaagagaagctaagagcccaggaggcttatgaagaaaaattgcagcaattgaaagaggaaaaagaatctcaggaggaagctgtggctgcaattgttgaagcgacaaaaaggcaagctgaagaagaaaagagccgcatccgggcagagatagaagagcagtacaggaaagatatgccagatcccgaacaaatatctgctttgcgaacccgcttagaagaatctgatgataaatataaaaagactttagatattttggaaaaggagaaaaataaggctagtaaaaaagaagaagaaattcgagagttgaaagaagaattagaggcccttcaggcagcacaggagcctcaaaaagacgttgaaaagattaaagctgagttgacctacaagcaatgctgtgaaagccttctgagaggcattaaccaattgtcgcaatcagttccgagccatatcgagcaaacagtaattacaaaagatattaacgacttggtatgtaagttacaagcaattataaaataactttaaggggtacaatatggatactagacgggagaaaatagaggacttattaaaatttgaggggattgaatgtaagggtttcggtgttcttcctaagtttgtcatgcgggatgtggacttaggaataggcgcaaaggggttatatgcctattactgtagtttagctggctccgaaattgttgcttttcctcgccgtgagactattttaaggcagttgaaaatcaacaaggagactttttatcggtatcaagaagaactaataagagaggggtatatatcggttcaacaaattcgagaaaaatctcaattgtttggagcaaatgtatataccttggttcaaaatcctaaaaaacttcagatgaccagaatagatcaagaagtgaaagaaggatatgattttgcttactacgctggtctaaaaagtcatgggtatggtattataccgcggatcgtcatgcaggatccacggctagatataaaggcaaaagcgatttatgcttattatgttgtctacaccggagcaggccggatgtcatatttacgacgagaattgattttacagcatttaggtattagcaaaaatacgtacggtaaatatatgcagcaattagtaatattagattacatggcaatacaacaacggaccgatcagcgtgggaggttcgcatccaatacatatatccttcgtaataacccagggcttcaggttcgttccgaaactgaaataaaagatatggataagtccctcataccgtgtcctaaaaaaccagacacggataagtctcccgtaccgtgtcccaaaaaaccagacacggataagtctcccgtaccgtgtcccaaaaaaccagacacggataaatctcccgtaccgtgtcccaaaaaaccagacacggataaatctcccgtaccgtgtcccaaaaaaccagacacggataagtctcctgcaccgtgtcccaaaaaaccagacacggataaatcttctgtaccgtgtcccaaaaatccggaccccaaaaaaccagacaataatagtattaataataccagtttatataatatcaatcgatctatcaatcatataggagtagaagttaatagatggaaaagtggagaaataaaaagttttttaataccgcaagatgtgctcttgtcagaatatgaaatggaatattttgtgaatgaacttttcggttgccgtacttacacaaatcccatggagcagggagcttatgaaatgtttaaagaagcgttaatcgaactggggacatcacccagcgaacgtgtattaaaaggcaatcgcattacatacgcaaaggtaattcgttgcctgaatcgtctcctgaaaaacagaacttatctgagtgcgtatagggcctgtgaatcacttttagattacgcaatacgtgattttacaactgcattgacgttacgagagataacagatccctacaaatactgtatggcctgtatttggaatgcgcttgtaacctccgaagtacgattttgtgcagaaacaatagaatacgactacccgatagaagtttaaatgtttagtgagactttcagttcactttctggtacaataaaaaaaattagacaaaatagatattttgtccaattcttatgtgtctataatattccaaaatggaaaaaaaagcaatactatttttatattatatacaaagtttgcaaaaattgcttttctctaaattaagagaatataatagaactaattttagagaaaattattgtgttataaaagactgtgtgataagatttagtatgaggtgaataccatgatatactataaaatagatgtttttaaagaactggaaaagcatggctttactcaagcacgcttgaaaaaagaaaatttattatctcaacaaactatctctaatattagagctggaaagtcaattactatgaacactttgaataaactatgcctaatgacacgcctacagccagcagacattatagaaatgaaggccacagatcaggaaaaagtgatttattattaaacgaggaggggaatatggtaacgttagaagaagcaggatattgttttaaaatagagaattcaggaagaatatattacttgttgatacgagaagaaggagagtttataaaattttttttgagaaaagaaaagacattctattggtttgaatgttacgcgggttcaatatataatgattttactagagaaataaacgttgggaatattatactggaggaggaaaatacagagtcattagaaggtggaaggacaactcaaataattaagttagctttatggtatgaagatgaatgtttagagaatgatgcagcttatcttgactacttattagataggttagaggaaatacagtccatggcttccagatagtttttccgtcggccatgggccatgtacattaggagtttaataaaagcttatttcgttttcattttgattcttttccattcttcaggatacgtatcctgataccattttaaaaaattaccatagatattttcttctgccgattttcttgctttaagagcatcatctatcttttcatataatcctagataatattgttttcgctgaaaattaatatatgcacgatattttccatatttagcataataagacacacctgttactttagtagtgctgtttttattagtttttcgccgaccgtctatagcaattatacttgtattatcaacaaaggcctttgatattatttcttttcctatttttaaattttttttggaacaattaaaacattgcttagattctccactcaaaattttataaagtgaaatttttactatggccccacattttaaacattggcattgtactacaggcatgtttttcttatcaaaatggtcgaatactattacttttaaattgttgaataccatatcagaataagaatttgctttaataattcgttgttctgtttttatcttctcccggcaatctgggcatcccacggtctgatatttcaagacctggcttccggtatattgaaacaatttattacatttcttgcatttacaattccattttttaactttattcgatgatggttcttcggcaaccgacattagggtaattaccccgtatgaggatccgtccttaagctttatttgtgatttgcgcatttatcatatcccaattttaataaatttctggttcatctgaaaaatcgccatcttccactacggacagcatagttttaacgcccttttccttagctgttttgatggcaaaatccttagctctattataatctgaaaaccagtccatcaaatcattgtcataaattccatttaccattgcttcatttgtgtatacagcgtattttcttgtcatttctttttcctccagccagcacggctctgcttgtatttatgaatggcttccttaactatctttattatatcactttttaaagtgatggtcaatagattttatatttttttagtgatatttatcgggggaaatttttgaacaacctttccttttcttctgcattatcttcatataaaattaaatcttccggttgcatattcaatatagcacatatcctatttaaagattccagtgctatatttgtatctccattcttgattttttttaaagtatcctgacttagtatttttgtagttttggctatatacatgttgattccagctttttctaattcatttccaacatcaattttatattttagcattaattcacctcactcccttagttcctcttatcttaaatattaattcatggttcgtggaaagtcaatataatatcactaaaaaaagttataaaatccattgactatcacttttaaaagtgatataatatagtcagaagttaagaaaacagtaaaaaatgaccagcagctccgccccggaggtcacggaggcagaaaggaagcaatgaacaaattgccacgtaaacaattagtattaaaggctgtattgttacttaggacagtaaatagatattcatcgaaagaaacgcaactcaaaatgatggataaatattactccaccgaacagttagaagattacgttgagcacttcaacgatccgcaaccagtttatgaagagcctgactatgttatggacgatagcgggagtgaatattacacacactacagcccgagcaatccgtgggatgctccaggaatgagcattcacgactttatatagcaacgttttttaccctaacccggccagtcaataccgggagaaagcgaggattgcatgaaagtaaaatggaatataacaaagtggtgtaaatccatcactgacagtgaaaaagacgaatacaccggatgcgatgtgacaggatgtccccaccgtttccgcctattagatgatgataacgaaatctacgcttatggaaatgcaagtgcaaaaacttttgaaccgcttgacacttatatgtacgattacggatgtaccgaaatccagtataaaaatcaggaaacaggaaaatacgaaaccctttagcgcgttacccgccccggaggttacgagggcagaaaggaatctgaaatgaaagctattataaagaatatcgcctctgaaaccatcaatgatgaccgcgtatcattcgcacagaccatcgacttctcggaactgtttgaccacattaaagtctttaccgatgttaactgcaatttcaatcaacccgaaattagcgccatcagaggtaatatctatatctcattcacatcggaaaacattgcaaagcaaacaggcccgtttgcggcaattctcaaaaactgctacttctacagcttcagcaacggcgtgaaccgaaaccgggaaacaaacgagttgggatattgggtgagtgtagatattatgtatgagcacaaagacggcggctcaaacggaatggatgttgttcacgcttcttacaccgagcggacgggatgggtgttccgcgacgcaggcaatcaagggcaaaaaggagggagcagcacatgagcagagattggacccccgatgaattacaggccgccagcgctgcaatgaaagcggccggccatatgagatatgaggaattttgcgaagaactgaaaaaacaagaagggagtataaaacttatgaaaaggctttatccggaaatcggaagaacatacacaaaccataacggtaatgactacatctgcagggcgatccctgaatacggctgcgctgttatggaacggctcaaggacaattgggttttggtagcacatggtatctgccagtacgatgacggaaccattgaatgggactattcgaccggcggccactggataagaccggaggaatagactatgagaatcaactattacagatttccggaggggattgaccctcacaccagatacaaaaacggggcctgtcataaagctggtcattgcgacatcgaccgggaaagttgccgcggctgccctgtatgcgaaggtggatggagcgagtgcgaacattttatttgtactgaagcagaggacaccgttgagggatgctctgtaactgaggccaagcgattactccgtaaatttggcggatccgcatggacggatcactgtgagagggccggcagcgtgtttgaggtcacggacattaccttaaaaggcaataacagccgcttcaaatataaccggcatttgtaagcatacacctgacctaccgggctgacggggagaaaggaatcgacatgaaattatttgtaaacggtaaagaagcagtggcaggaatgaaggttcaaacctttagaggggaggaggcaatattgcttgactggtacgaacccggtacgcggtcgggcggcaatggaggtcgtgtatatttgaagataaacgatacaaaaatggaatattttccgagcatcataaatggcaaatttgcagaatgagccgaaacgcccgatagggcgtccgtaggggatcgcctctctgcgctgaagatggcaggcgagaaatggaaaattgttataatttattgacctcccaatgtcagggaactgagttccgttgagaaccggccgcccggggggaacagaactgagttccgttgggatgcagctgcccgaggggaacagaaccgagttccgttgagatgcagctgcccaggagaacagaactgagttccgttgtgatacagctgtccgtgaacagaaccgagttccgttgtgatgcagctgcccgggaacggaactgagttccgttgagaaccggccatccgtgaacagaactgggttccgttgtgatgcagctacccgtgagcggaactgagttccgttgagaagcggccgcccgtgaacagaaccgggttccgttgagaagcagccgcccgtgaacagaaccgggttccgttgagaaccggccgccctgaacagaaccgagttccgttgagaagcaaacgtccgaggggaacagaaccgagttccgttgagatacagctgcccaggagaacagaactgagttccgttgtgatacagctgtccgtgaacagaaccgagttccgttgagatgcagctgcccgggaacggaactgagttccgttgagaaccggccgccctgaacagaaccgagttccgttgagatgcagccgcccgtgagcggaactgagttccgttgagaagcggccgcccgtgaacagaaccgggttccgttgagatgcagccgcccgtgaacagaaccgggttccgttgagaaccggccgttcgggggaacagaaccgagttccgttgagatgcagccgccctgaacagaaccgagttccgttgagatgcagccgcccgtgaacagaaccgggttccgttgagaaccggccgttcgggggaacagaaccgagttccgttgagatgcagccgtccgaggggaacagaaccgagttccgttgggaaccggccgccctgaacagaaccgagttccgttgagatgcagccgcccgtgaacagaaccgggttccgttgagaaccggccatccgtgaacagaaccgggttccgttgagatgcagccgcccgtgaacagaaccgggttccgttgagaaccggccgccctgaacagaaccgagttccgttgagatgcagccgcccgtaagcggaactgagttccgttgagaagcggccgcccgtgaacagaaccgggttccgttgagatgcagccgcccgtgaacagaaccgggttccgttgagaaccggccgccctgaacagaaccgagttccgttgagatgcagccgcccgtgagcggaactgagttccgttgagaagcggccgcccgtgaacagaaccgggttccgttgagatgcagccgcccgtgaacagaaccgggttccgttgagaaccggccgttcgggggaacagaaccgagttccgttgagatgcagccgtccgaggggaacagaaccgagttccgttgggatacagctgtccggggggaacagaaccgggttccgttgagatgcagctgcccgggaacggaactgagttccgttgagaaccggccatccgtgaacagaaccgggttccgttgagaaccggccgccctgaacagaaccgagttccgttgagatgcagccgtccgaggggaacagaaccgagttccgttgagaagcagccgcccgtgaacagaaccgggttccgttgagaaccggccgccctgaacagaaccgagttccgttgagaaccggccatccgtgaacagaaccgggttccgttgagaagcggccgcccgtgaacagaaccgggttccgttgagatgcagccgcccgtgaacagaaccgggttccgttgagatgcagctgcccaggagaacagaactgagttccgttgggatacagctgtccgggaacggaactgagttccgttgagaaccggccgttcgggggaacagaaccgagttctgattatagcggacgaagggaacggaactgagttccgttgggacctagcagttgaagggaatggaagtgaattccgttgggacctgcggtcaaagagaacagaaccaatttctgttaagacctgcggtcgaagagagcagaacagagttctgctgaaaaacaaaagccaagccccctactcgccgcttgaccccaccaccttaaaagtcaagaacttttaaggcaggaatagggttcagcactttctggctgaaccaccacacatattactggcaaagccagtaaatataagagaaatttagagcaaaaaaagtgtgtactagatgaaataaaagctttaaataataaattggtgcagcacttaatgccaattacctttattttatagttaatattaggaacacaccttatcaattttacagtaaaataaaaaggagaggtgctaaagtttaaatctagcatctcctttaaatttcgtcaaaaatctaatcagaattgattatctctgaaaaactcgtttatatctacatttaaatattgagaaatagctaccatctcagaagcataaatattggcgagatcatgttccaatttatagtatctttgtttgtttagcgtgaatccctgtaattgtaaatcccgtataagatcaaaagcacgaactccttttgaaatcctaatgcgttttatatttgccccaacactgacacgattatcagagcgaatcttaatttcgttcattccgaaactctccttgaattttatgattcaatgttatactattgaaaatataggatggtatccgtatagcttactgataaaagcaccagggatattaagagctataaccaattgatagtatgtagaaaaaaaacatagtaatacattaaagagaggtggaacctatggaacgatttggacttgatagctatgaggaaaaaagggatataaccgaaaaagcaaaaaggatttgtgattttatttgtaaatcagattatgatttttataaagagatccgggaagaaacgtcaaaagaggaatttgaagaattttgtcgggaatttccagacgccagaattgtattgaataaagaaaaataaggaagaaacaaaggttaatcggattgaatatagagattaactatatgaatttaataatcttcggacgtcctctgacacaatgatttattgtattgatagcccttatttacatatactacatttatttagaggaaggagcttttatcgtgattgattttaacagaaaagatataaatcctatgctcattggagccagcagcgaagcctttaatagtgatgactatatatatgaattaaaatgggacggggaacgctgtatcgcatatctcgatcctaaattggggacggaattaaggaacaagcgaaatgtaagaatgctatctaaggtccccgaactctcagcgttgcataagcaagtaaaagagcggtgtatattagatggtgaattaatggtattgaaagacggaaagccctctttttatgaaattcaaaaacgaagtattatgacaaatgtattcaaaataaatttactttctaaacaatatccggccagtttcattcccttcgatattctatattacaaaaataatgatatatcattgctgccgttaatggagcgcaaagaatatctttccaaagcggtaggtgaggaaacagcacgaatggctttatctaaatatattgagggccaggggatggcattttacacgcttgctgaacagcaagagttagagggcatcgttgctaaaagaaaagacagcgtatacattgagggaaaacgaacaaaagactggattaaaataaaaaatttgaaggatgatgattttgttatttgcggatatatctacaaagaaaatcacatgataagtattgttctgggaaaatatgataaagacaagcttgtatataaggggcatgtcacccttggagtaggaggtgaaaacttcagacgcataaaagaagtaccaaaaagtgacgttccgctgttcccgttgggaagttatgataaaactgtctggatcagacctcaattggtctgtgtggttcattttatggaatatactgcaagtgggagcatgaggcagcctgttttcaaaggactgaggtttgataaagaaccggaagaatgtcaaatatgagtatcactatataaactagcaatattcacacccaaagcctggctgattgcaagcacctcataatctgcgataaatcgttctcctatttcaatcctgcttatggaacgttgttctaactgtatgttatgccgagtttgcagccgggcggcaagttgggactgggtcaacttttgttcgatcctgattcttctaatatttttcccacatatatttgttagaccattatactgataaattttcacacatacagcctcctgcgcgtataatataaccatttaatacaatccgttttatcttgtattttacaatttatgtttttactttgcaagtaagataatctttgttttaaggtcgaagtaccgaagcgattctattttcatcacaaacccaaatgcgaatacgaagcgtagtctgaaatgctgattttgtcacattgacaaaacggctctgtaatgttatattaaaagaaatccagagtattaaatactctgcgtatcgtaatatcaacttaacagttgctgttcgcccatttcgggcgtggattgaaaaaactacttcattcagagctattggaagtttctgttaagttgtaaagcgggccaggtatacctggtccgcttattttaaaatgattattaaaagatccttcgtttcttttaacagaagaggagctttccatatcctactcttcaccaagctccagaccctctgaggtctcttttttttcctcccttttcttttcatctgcaatcttcctgatttcttccagtatttcctccctactgtatttttgcgttttctcgggaaacctccgatgctttacgacatacctgacggtaaaggcatagccggttatcgcaaggtcgatagctgacaggtaatataggatatcaagcttaaatcggttccacttcttcatgtcaattccctttccttataattttgtgtagtattataacgcaattataaagtaaatactatatgatataaaatctattttagaattttggataggttacaatggtaatataaaatattgcagagttgggaagtaaaatgatggatgaaggatatgtactgaaacgaattgaagagctgtgtgagaaagagggatggtcgcattatgtcctggcgaaacgctctggtatatcccagtctaccatatcaaatatgttcagccggaccaatcaaccgacgtttataacagtggcgaaggtttgtgatgctttcggaattacgatggcacagtttttcgactcggagcagcaccttgatttaacagacgaacaagaagacattttgcgtatgtatgacgttatgtccgcacagaaaaaagaattagttaaagcttttatgaacgggcttatgaaaagttaaataggcgacagaagtgattcggtcactctatagaaaatgcggcagggaatacccctgccgcttcgtgacatagaacatttatattagattttcaatccacatctccagacagatttatatgtattcgcaatttattccgatttgaatagtgcgactgggaatgccatagcgccgaaccagttcggcacggcttattcccagtttctcacgcaatccaagaaaacttgattttgacagtgagaaaataagctctaaaatatcagaaatctcggtcagtgaatatggctccatccaatcttgccagccacgttctgcgatgtacatttcgacgtcgttatagttatctgcctctcggaacaggcgagagaataaagtataagtcatgctgccatacctcctttgattgcatttttaactgcctgacggccagctaatttttctgcggccgatttgctcattaattcccggtctctgaaatcatattcttctgtatcaagccatatctgcgcatcttccatgttatcaaaaacataaacgatatgactccatccaaaatcatatttgcttgatacttcgtagactttacctgttctctcaaaatatttttccatcttcatttctgttcctcctatttatcgacatcacggtcaccgtgatatatcaacagaaaattgaaatataattaaaaaaatgttattttaaatataggagagtttaaagttgcaagggggaagaaaaacgtgtatagaacaaaacgattatgcaaaaattgcgggaagatttttaatggaggagtcgataagacattgtgcgatgactgtgcgaaaataagccgggcggaaaatgttgtaagatcgcgtatatgcgtttcctgcggccgtagctttaacggagggccgagggcaaagcaatgcccggaatgccgcagtaagaagaaacaggaaaataaaaagccagaacgaaaactgggaagtatagataagtgcgtagactgcgggaaggaatacataatccaatcgggtttgcaaaaatactgtccagaatgtaaaaggggagcagagctacgctggcagcgggagcggaagatgcaatataatcgcgataataatgttggagaattaaggcgagagcgaaggaaggacagaaagaaggcgtgcgtttactgccttcggccgttttggtcagggacgggaaccaacacatgctccgtttactgccggaaacaaaacaagcgattaaaccaggcaagagccgatattaagcggggaagggggaggaatacagaacaattggaaatggaaagggaacagtacagagaagatgtaagggatgattaaattagaatagtagttgttcggttaaatatatattttgctaatataagcaacatgttcctggcctcagcgaaaataactgtatgtttctggtacaatgttgaaaccagtaacccactgtatgacgaatttgctttaatttggtagatatatgctaaattatatagaatctggaggtcctggaggtatttatggatattgatgtcttaaaggaattgaatttggaactgctaacagagcggcaaagggccgttgtctcaatgaccttagacggaaaaactcaggtcgagatcgggaaggaacttggttgccgccaggcaactgtcagtcgtttaatccaatatgcgattagacgtaattcacgcattctgaccagcaaggaaaaaccgctctcaccaaaaaagacggaaacacaaaaaaaagatgaaaacacccaaaaaaagaaaatcaactctcactcttcatcaacaaatagatacaatagatacgattatggagtgtataaagatagggacctttccatattgtcccagcacgagaaagaaataatgactcttaaaatagatggattaacttatcaacagattgcggataggcttgatataacttctggctgcgtcggagcgctaatccaaaagtcacgggcaaaattggacggaacatatagatacaatagatacaatagatacaatagatacgattatggagtgtataaagatagggacctttccatattgtcccagcgcgagaaagaaataatgactcttaaaatagacggattaacttatcaacagattgcggataggcttgatataacttctggctgtgtcggagcgctaatccaaaagtcactggctaaattggacggaacatatacacaaaaaaaagatgaaaacacccaaaaaaagaaaatcaactctcactcttcatcaacaaatagatacaataaatacgattatggagtgtataaagatagggacctttccatattgtcccagcgcgagaaagaaataatgactcttaaaatagatggattaacttatcaacagattgcggataggcttgatataacttctggctgtgtcggagcgctaatccaaaagtcacgggcaaaattggacggaacatatcatgatggtttaagattaactataaatcgtaggaggtatgaaagtgtactaagagatcctgtacgtgagaaggaaaataggaaaagaacgtacagaaaaaacagaaaaaaacgtatagcagatatgaaagaatataataaaaaatactaccagcaacaccgggagaagctgttaaaaaggcaaaaggaaaggcaagagaagaatcgggaggaagcatgaaaagatattcagattgtatcagaactgacgggctatgtggactctgttccgcatccagccgtggcctggattgccacaacaacaatattaataaactgttatatcaacgctctttggccgagatgacccaacaacaggtacttcgtcgtaaagctctacttcaaacagttttacctattatgtatgttagaatctgactttataccgcctgatacccactaataatttgtttggcctggactatccttgagccagcaagtattgtaacttgatcttaaaattgccaaacgcttcacaggagagcggctacgcgccattgtgagtgctaatagacaggagacttaaccgcctgaaaacaagtatgctcacagcgtggagcaggaggcgccgccgcctcttgtgtacatatgattctattcaagatatgaactacgaatttgattttttctaaacctctctttttgtagttttatagattctgttgcacgttctgttgcataagcctgtttattttgagaagaaaacaccaaatttgtatacatagaattcaacagtttatagcttgaatagattaatttattttgtaagatattcttatacatttctagttggtttttagccggctcatagtcttgttcggcagctttttctaaccacatttttccctgtttaatatcacgtcttccgtgtttcccccaaagataaaaactacctaatgaggcttgcgctgaagtgtagccattatcagcaagaggatttaacagagataaagctatatctatattgtaatgctttgaatccgttttcagatgcaataacgctgttaggtagagagcttgcatccgcaattcgtcttcctctgctttatttgataatgtatttaaaaatgccactaatttgtcactgttaatgttcgtaacaattgcattatcctcgctataaaggtagagttgtactaatttgaagagtgcaaatggattgctttgttccgaaagaacatctccggaagcctcccataaatactgaatcgccttgagggggagtacagagcagacccttcttgcaaataaaaaagaccgagataataagctgcctgagcatgatgatgaagattctgttcattttctgctattggagactcataaagtgtatttaggcaaacaattaacttgttacgatctataaatgagctttcgatatttttatcatcttttaggcgaagctttgctaattgaaagagcgcaaaagcagattgagagtcattatcagtttcggcagccaaccaaagatattgaatgccaagagctttatcatacagaacagaatcttcctttaaatgaagaaggccgagatagtaagcggcctggtcatgaaaattaagatttctttcaccttctgatggattttcatgaagtctctttaatgcaacaattaatttatccggttctatcgatgatgtttcattatcctctttcagatggagctttgctaattgaaagagtgcaaaagcagattcagaaccaacttctgcttttgcagcaagccaaagataattaacaccatccgctttactgtattgctcagattgttcctgtaaatagagcaggccgagataataagcggatctacaatgataattaagactttgttcagcttccgttggattttcattgagtctttttaaagcaacaattaatttgttcggttctataagcgatttatcgctctcctctcttaattgaattttagctaatcgaaatagtgcagaagcagattcagaacctattcctgcttcggcaacaagccaaagatactcaatgccaatcgctttattgtactgttcagattcttcctgtaaatacagtaaaccgagataataagcagctcgatagcgtaatattatatcagttgacttctcatgaagtagttctaattctgatagcagcctgtgggtgtcagtaacaattacagccggctcttttttatataattgaagttttgctatttgaaaaagggcggtataatttctttcctccgtatttcccgttgttgctgactcccataggtattgattcgcaataagaggattgaacaactcagaatcatcttgcagatggagaagagcaaggtaatataaagcttgattgcgttgtttgattgctacgtcatcttgtactaatttatttaaggaggtcattaaataatctggagtgatgtcttccgctttttctggctgatataagtgaagtttgactaattgaaataaggctgaataattatttgaatttttcgaaatttccttcaaatattttaccgccaatgaaggatcaaaaaaatcgccttctttcaaatggattaagcctaaatgatatgcagcttgttccttttgcttttcgtcttccgaagcgtatattttttgcaatttagtaaccagcttttctacatcaatagggggttctggctgcgtgtaatgatggagatttgctaatttatatagagcgaagtgctccttatttaattcaaattctatatctgcagattgccaaaggtaacaaataccttgttccaaatcagcatcctctttaagatgtaataggccgagatagtatagggactgacctttcagagataaatcttcctcattctcagtttcaataatttcttttaaagaggtcataatggtatcgacatgaaacttatattgaatctgagctgattcggcagagaggtacatttttgctaaagcaaacgaagcaaatatgttttttgcttcagcagcttggccgaaataatgagctgcagcggcaggattctttgcggttcccaggccatcagcatacattttgcctattttataataaacggaatcatctggattttttatgtcgagaaagccggtaagagcctttgcatataaagctcctgctttttcattattttgttctacaaaacgtccgttagtataaagcgaagctaaatcgaatgcggcaaatggtgttgtttttgaggcagatgtaagcaaatctattaattctgatgtcgtaaaatccaatggtggagttttttggggttcattatcaatgcacttatcttcctccattgctttatattcttgcatatatatttttgctaaagagtattgcgcataggcgttcggagaatcagcttccatagaaatactcttccggaaccaatttttggctgctgttatatctctctcagttccaatccctgtttgacaacattttcctatcctatatgagaaataggagggcaaaaatttattctcattatttttttcagattcataaacggtcaccatttctctgaatccggctgtataatattgggaagcggtgttcggcgccttctcttgttccagcattcctttatcaaaaattttccctagttccattagtgcaaggggatttttttcctgagcctccgcctctagaagagcaagaatatctgctacttgttctggcgattttttttcttctgaatatagtgctttttttgcaagtttatatgatgcggtccaataagggtattctttagaagcacttcgagagctgctttttttatgattacccccaatttcttcatgcacatgaacatctggttctaagggctcttctgcattaaccagaaaagttaagtgagaatcgcttggctgcggtgtaatgatttctgagtaatcataatgacgccttgccctttgagttccgattctttgttgtgtcatggattctatagctatatcgccatcgccagtgtcttccatattgtttttgtcaggcataagggcatcgacaggaatcgtttttactttttttaagataatattcgccaagcgtgtccgaagctctttttcagcactaaataaattgtgttctgcttttttacctacaacagaataagaagcagaaatttttttacacgcttcaacatattcacagtattttgattcaaatgccggataagaaagaatgtgttctgttatgctatcaacttctttcttaacttcaggaggcagaaatttatagttcaaacggcctgttggaagtagtggatgcaaattaaaaagtaaagcggatacttctgataattcttttggagttatttttaaaactccctctgattctaatgagagttctggatatccaaccagctctttactcatatcaagcaattcattgcgtgctgctgtttttattgcaacacttaattcccgatctgcttcaaagatgtatttactaaaaatttgacggcatctattttggacacttttatgtataaagggagaggcgattttgtcatcgttacgccacagcatataatgtatgtgtggatgtccttgttcctggtgaaatgccgcaacccaggacatgttttgaattggtatattaaattcatgggcaatgtctggcattgccacatttaacaaagagttccaggaatccttatttgtataaccgagtcttgttgcatcttcttcatttagagatacaatgcctttataaattactttttgttttgagagttggtacatctctttacataaggcatcgagatcaccaatttttttattggataaattaccaaacagaccatgactgcgtggacgttcggaaatatattttaagtagatactggcatcgtcgcctgcagaggttttgattggtgttaaatcaacgcctggccgggttgcaatgtattttaaatgatttaaagtctgaacggctgtgttctttcggttaggggatgcacatcttattttagatattactatactctttgccaatttagttcacttcctattcttctaaatctattggaaactgtgtttttaaataagctaaggatttcttctgcgctttttcatatgccgctgcaaaatccagtcgcttcccatctggaacaaaccggcttaatgtttcggcacaaagatatgcagcagttccggcttgcatacatgtttttgataacaagcgtaaatcgcgttccatgtataaatgcataatagctgataactgttctcttataatagttgataaaaagtcaaggttttcttgacatacttctgcattaagtgcatcttctataagttcccttcctataacagacaagtctttattctctttttttgccatatttgatatttgtcggtatgtttcgggttctaatgtgattgatattctaggttttttagtgggcatagttttcgcactccttattattttcatatttactcagtgcttcaaagaggtggttcattgcatcggctgtaaattccagataaatcattgtattcgaaatatttttgtgtcctaaccaccactgtatatcatttagtttaaattctccatacttaatcaattccattgcacgggtatgttttaatacatgaaaatgccgtttatcactaggaattgttgtttttttacaataacgtttcataattacatctaacatttttcgactaataggtttccccttttgagatacaaataaatattcatttttagcgttagctttaattgctaaagtctcacgcaggctggaataataatattgattgatgatagtcaatatatagggatcaactattcgcaacgtattatccttgctgccttttaagcggtgacaatggatcgtaccagtaaaaggattgtaatcatttaaagtgataagtccaacctccgaagccctcagtgcacaatattttgctatataaaaaattgctttattgcgtaaggcatactttgtacagtctgaatttatttgataaaataattcaactttttccaaatctgttaaaaatctgatattgctggtagatacgcttcgactactggttctggttctcataatagaatccccctttgatactataggcttcttaaaattggacaaaatatctattttgtctaattaggtcgcctgattatttgagagacaagtatataaccaaaagtggcgaaaatcaattttttaaggaggtaattatgcaacattttatctgtacaggacggctatgtgataacccaagcatcacacagggacagaaaagtaagcgtgcgtattttcagattgcaatttcacgcgatatacgcaaggagggagctccggacgcggattttctcaattgtgtagcctttaaagatagggcggattttgtagagaagtaccttagaaaaggcatgaagatagaagtgatgggaaggatagaaactagcagctacgaaaaggatggaaatagaatacccacttttaaagttatagtatcttacctaaattttgcagaatcaaaaacagcaaacgaaaaatatcatttggagcaggagagccatattggtaatgaacaagccagttatgggaatggggtttctgattctgattttattcctgtatcagattatgaaaatgaatttctaggaatggatgcactaacagtatgtcccgaatgcggatgcgacgttccagacactgtaatcacttgcccggaatgtggggcaaagatgaaatagaaagtaagaggctatgacaaggaaaaaggtagttaccatcgggcttttaacaatttttgaaatacttatatccatatggggagcctatattatacatcaatatatgtactggatcatgcacatcgaaaaacaagtgacaccgaatattgattatagctacttgaatagtatttcagcgtttattcaatttcctgaatgtaaactatggtttttcttgctgcaactgctgtacgtaaccttgatagtgtggatcttgattcgcccccaggcaaaaattgcggatgtgaaaacgcagaagataaccgataaaatcgaaataccaattgcggcaggaacagggcaacatggttcagaacggtttacgacagtggcagaaaaagatgaatgttttgccatgtttacttattcagggacagagcaacttaaaaaacctggtgttgttgttgaaatgacaaaaacaggaaatattgaaaatatacgctatgtggatggccctaaaagcacaattattattggcgcgacacgatctggaaagacaagaagagtgttacttgaaaccctttggcttcagctgatggcggggtactcaactgtaatatcggacgtgaagggggaaatttattattatacgagcaaatgggcagaaagcataggatacacgatcattccattcgatttaaggtcgccaaagaaatctattcattataattttctgcagccgattattaatgcgctaaaagagggtgatcgtgctcaggcgatagattatgcatgggatttagtcagcgttttagtgggtgagcaaaaaggtgagccgttatggtataacggtgaaactgcaacattagcagctgctattttagctgtctgcatcgagggaaccacggaagaatttagagctcaaacgcaagaactgacggatatttattatgaagaaataaagggcggtattccgaatgacgaatcagagggattacgtacagaagagcgaaaacagatagatgaactttactgggcaatgcagtcggacctgctgtgtggatacgcgacaccatatatcgaagaactccaaaatagggagagtaagagcggattgatagaaaagcttcaggagctatcaaaaacagataattctatctataaaaatatgacaaatgtttactactttcttgcttacatggggagagaggatccttcaactggaaaaacccctctatctttgtatctcgatacgctacctgattcacatcctgccaaaattgtgtttatgcagggacagatagcggcggagagaaccaggtcgagtttttatacttcagccttgggtactttaaaacttttcactaatccaaatatcgctgaaatgacatcaaaatcagattttgagctacaagatattggcaaacggaaaacagtaatttacttaattattccagatgagaaaaaaacattttatcccttagcgtcgattatgattcagcagatttacgtggagcaagtgaaagtcgcaaatcaatatggagggaaactaccagtaccttgtgactatgatttagacgaagtgggaaactttccaatcattccagtattgcctccgatgattacagccggccagtcaaggggagtcagagtgaatttgatcattcaggattatcagcaaattgaaaagaaatataaagatgattatgaaacgattaaatcaaactgtgcagttaaaatatatctgaaatcagatagccccaaaacattgaaagaaatttccgattacttgggaaaatatactgtagaagtgaccagtgcttcagcaaatgccagtttaaataaagtccaggagggctcggtgtcaaatagcagtaaccttggaggaagagaacttctgatgccggcagaaatagctcatattactgctccttatgcattggttatgaatcaaggtacgtattcgtcgattacgaaactgccggatttaagccaatataaagttaatcagctatggggcttgggagacgaagcacataacacaaaattaattgcagcgcgtgaatcagagcgaccagaacgtaaaaacataggttcagtgccgctatggggaatctggaccacattcaaacaaaagctggaagatgaagcagcagaaaattcaaccatgtcgtttttaggaggatgaaaacaatgaaaattcatgataacagaatagttaaaaaaattgcattatttcttacaagcttatatatagcttcttccaatttctttatgtcatatgcaagcgaggcagacttagagaataccaaattaatcacagggactaaaagtttattgtcagttgcgaccggaatactcacaggccttattttagcagtaacaatatttgtatcggtaaaaaatggattaacatggcagtctgcagatataaatgagaaacctgcagccaaaaaaaggtttatcacagagattggaattggcattttaggaataacaatcggtagtgttattacagctatatttgctttttatcagtaagaagggaaccacatatggacattataaaaagttgggtactacaaaatattttgtctggctgtgccgaacttttacagcagttcttaacggtttttggtgcaatatttgataatatttttgtggtcgtagcagaatttaacaaagatattgcttccggagtaacggattttaccttgccattctccattgcatttattgtttttctaaccataaagcaatactttacggtctatgtactggaaacagacggagatccggatgcggatccattagatatatttttaagggcagctcaagcgattgctgttgcagtatgttgcgattggatatttgattttttcctgcagttttcaagttcttttacttttgatttacagagtaatgcgctcaatacaggaggacaggaagtaagcgacacattaactgaattactttctataccagctaattttcaatctataccagcagtaatcataattatcgcgattggagttacggttgctattatcattttcggtattagtgctggaatacgtggagctgaactgattctatttaagatgctatttcctctctttgcctgtgatttactcactacgtcgagagagcgttggaacggtttctttacttcctacatggttacttggctggcctatggattgcagttagttagttttaatatgtttgcatctacattaactgtttttattacagcagatactacagatttttggaaactatttgcaattatggttgggtggttgcttttaatgcttcgcgctcctaaatggctggaaaagtttacatatacatcaggccttgcgagtggcgtacatggggcaggccgcagtcttatgtatatgggaatgaaaaggagataacgctatggagacaattggaaattacatcgttcctgcaattagaatcatggtggatttcttgctgctgggagtaatagccagatgtacatacattttgtatatggcttggcaagatggcgatattcaaaaagcttttcaaagtatttggaaaagaattttagctggtattattggaatttgcgcaatggagctggtatatgctgtcgcccaaatctatggttacacaggagcaatttacagataagatgcagaggggacgcgaaatgaatcataaaaagcctttatacataccagtcaatacaccagattatgacgctgtcatatcaggtgtaggtacggttgagttagggatctttacttcggttacagcagtcgttattgttgtcggaattatactatcgcagttagtaagtattttgtttgctgttgtgctggggttgacaattataggtattacgatactaacagtcaaacgtgatgcacacaatgaaaatttctttatgattatgaaaatcattagaagctataagaaaaggcaaaaaaaatatatgtatgtatatagcaatatatacgaaattccactcaagggagaggacaaaggagaggagatacagtaaatgaaaagaaaagaggtatccgagagtattccacctcatataaaaacggccaatgaatttgttaatgttaaggatataaaaggtaactttctttatacgaaagatgattatatttttggctatgtacggctatatcagttcaatctggatttgttatccagagaagaacgttatataaaaacacaagcattaacatcatcctttgaggcagatcgaaagagttttgactatttatcttttccgagagagatcgacttggatgattataaaaattctttaaaagaaaaatataaggatgagctgaataatttggggaagcgtagaattttgcttattatgatgcaaacagcgcagacgctgacgacctccggagaaaattacgaacatcagcaatttataaaaatttggcaacgcattgccgggcatgaggcggaagcaaagcatgatttatacgaaagactagaggaatttaaaaaccgttatatatcggtaggtgtccaggctgaaatactggatgagcaggaaattatgaaattatgcaacctgttcggaaatagccggcaggtaagttacgagaatatagaatcaaatttgatgtatagcaatattccacagattagaggatagaaacatgaagaataaacagaagccagaggaaatacgagcttatgaagatgtaaatgaaaatatattaaatattattacgccctccgggattgattttacaaatacctctgccaatgtgggggagaatatcgggaaaatttattatatatcaaaatatccatccaatgttgactatggatggttagctccgttgtgtaatctggaaggaacagcaactacaattgaatatcgctatacgtcccctgacagaatgcagaaagtaatgaacaaaaaaattgcggagctgcaagcgaatgtcgaaactgcgaaagaagaatcggatcgtcagcggtatgcgcaaggggtgaaagatcttcaggaaatgattaaccggatcagcgtccgaggcgaaccagttggatatatcaatattatgttattcccacaagcaacagcaccttcagagctggaggcacgcttaaagcgtgttacctcagccgtatctctagaggagtgtaatatacgaattttgaaatatcggcaagaacaagcattaaaagcgatcagtccctacggggtgcctaatgtggtcaatgtatccaatatgggagaacgtaatatgccattatcaacctttacaggaggctggccgatggcggccgccgggttgaatgataaaggcggatattacatcggtaaaacgaaaaataatcgtactgtgattgcaaatcaatggttacgtggcaaagatcgtacaaattcgaattggattataacaggagtaccgggaactggtaagtccacagccattaaatatattttgtcttctgaatatgcgtttggaactaaagttattattttcgatccagaacgtgaatatgtggaattgacaagtcatccgtacttttctggcgaagtgattgacggggctggcggcggacaaggccggattaatccattacaaatacgaactgcatcgaaagtggaaacggaagagggggaagaaacggaggattacgatgatactcatggttcctcggatatggctatttatattcaacaactaagagtttttttctcactttatttcggtaaagaaaaatttgatacggagatacagacagcattagagcaaagtctaattgaactgtaccaggaaaaagggatcagttgggacacagatgtcagaaaactaaaaccagaagattttccctatatggaagaactatatgagcatgtaaaaaagaagggagaaatgtcaaccgatgaataccggaaaactctatgtaagcggttggaaatgctgctttatagtgctgccaaaggggccgattcaagtttatggaatggtcccactacgttaaatccaaaagccgattttattgatgtggattgctcaggactattggaactggatgataacgtaaaaagagcgcaattttacaatttgactatgtgggcctggcagcaaatgacaaaagaccggagcgaaaaagttattttcgcagtggacgaaggatatctattcgtagatccagattatccggatttaatgaaatttttcagaaacattagtaaacgcgcccggaaatatgaaggctcattaatgtatattacacattcggttgaggatgtgttggatgactccgtgagacggtttggacaggcattaatagataatgcgtgttataagttgatttttggtacagatggaaaaaacttagaggaaacggcatcccttttaaaattgtctgagcaagaggaaacaattttagcaagtaaaaacagaggccaggctatcttttttgccggttccatccggttagatttacgaatcgacgtaccagatgaatttatagaaatatttggtacggcaggagggcgataatgctacccccatggctaataaagacggctataggacaagccttaaagccggagaaccaaaagcggatactgctatgtgtaggaggtattatctgtgcattattacttcttgtcgcagttatattacaaccactttcttttttgacaggagaaaatattacaacagactttgacatcacagcctccgctgcatataaagaaatctatcccgtatatgaagaatacataacagagctattagaggtattaaaccaaaaggcagaggatgtaaaagaacagcataaaaaatggataaaggagtacgagcgtgatcctcagacaggtgagcgcgttgaagcgggtggacattgggaatatcctgatgtcgaagttattacacctgaacctccattggcagctttatttgcctggctttctcaaaataatgaagacatattaaaagctaggcgttatcaagtgaatgctcaggaaatcaaagatttttttaatagtatctatgagtttgaagtaactgggagcgacatgagctatacggtggctgctcattttttaacagatacagaaattgcagagaaatattatccggaaagtgaagcaagccgtgacttatttgcacaaagtattgcattaatcaatgattttttagccgctgccggatatgtacaaataggaggagagctaaatctcagtgcatctgcagtcgagacactgacaaagatatataacgcatttatagaacagggatattcaaaagctgcagctgcaggagcgtgtggaaatattcagcaggaatgtaatttcaattatacgttagggcctccagcctatggaattatccaatggacaggtagtagatttaaagcattacaaaaacatgcgatagaaaataattacaactcatggaatgttttggaagctcaaattgaatttatgtttcacgaattgaatggtacatatcagtcgcgtctgtcaagttattcatcaaaatacgctgacgcagcgcaatataaagatattcaagatccaagagaagcggctttcgtcttctgtgccgtgtacgaaggctgtgaatataatcctgataaaggttggggaaagccgcaggggagtacagtcggaccagacggtaaaagatggcaacaattggaataccgtcaaaattatgccgagaaaatatataatgcattttccggaggaaattcatcgatgggacaggttgccaatggttcgtcgtcagaaaaattggcggcactctttccatccggccttcctaactcatctgcagccgcagatcgatatatggaacgtattccgatcgaagtttgggatggaagtaaaaaagtgacaaagtatgtcacgctgcatagagcactcaaggaggacattcaggaaattttttctgagattgcagcggctcatataccactaaaaagtgttagtggatatagctggcgaggaatgaataatggtggttcagggagccgatcgcatcatagctacggcgttgcacttgatattgaccccgactttaacccatctggcaaatatagccgtaatccagtcggcgtcaaaccggatattagctgttattactacaaatatccatggcaaccgaaagtatcaacattatcaatatcgcctgagagtgttattgtacgagctttcgaaaaccacggttgggtatggggagcgaaatggggaactgtcagtcggccgaccagagggccatatgacccaggctatcatgacttcatgcatttttcttttacaggacattaaaggaggcgcagatgaaacaaaaaagtagatccagatataggaaggtgcttctgctcctttgctttggattcacatttttcttttcgtattcagcctatgctgctgaaacagaaaagaatgtaatcatccgattggatttgagtcattatgattcattcagcgaaacaattaacgtaaattgtattggtgataatggcgatgaaatgcaggacacattgacgcaatataacaactatgaaaatgcttattacttgccaactggccgatatcagatttccctttcggtacagggtgataccctgaatctaattgatttaatgccgatgtcattcgaagtatatgcgacagaggatgaaatccagacttacataatcaaagtacaggatgcagccggcatggaggccaatgagggaagccatgaaggaatggaatacgaagaggaaagcgcgcccagggcgattgaggcagaacaatatacctttacagagacagaggaggaagcagggaccctgttgattaccggaccagatgtgacggggcttgaatcactttcctatacattacaaagccaagagggaaaagatatcatctgtcaattgaaaaaggagtatcactttcgagcagagctgaaagtgccttacggtcgctataaggaaatgttggggccagtggaggtaatcgcgaacgaagatataaacattcctgaagatgcagaattctatcttaaatactatggcagcaaattcagcaacttgctcgtcgttacagaagaaagcagaaatgctaccaatgcggataatctgcagctttgggttcgacgtagtagtggagcagattatcgggtacgtaatatgtatcaatttgctggtgatgaagtaatgagagctgagggcgaatatcaaataatcggacatgaaatcgagccagaactggaagagacagaacatgacacagcttcggtaattagagaaagtgaatcagagatacagaacgagacgagttcgccagaagaaaaaagactgttcggaatcaatattgtgctaacagctgctattattatagttttgtttggtcttctatggtacgggaggggaaatgaaaagtagattatataagctgtgtatgatttttggatgtattgcagtgtccgctatcttgctaatcgcaagatatttatagaggagtatagaaatggataataaggtactaacgctagatctacccactgaaataataaaaaaaatagatgagtcaccaatttctgttacgaaaagagggcataaaagcaggatgtttcgctttttgcttataaagggtttagagcaatacattaacttagatacgaaagagttactaggaccgattgttctggaaaaatcaatatcggatcaatatccctctcgtgccgggtttgcgattacagaggatataagtatgacactggaaaggttatgcgaatattatccatttacaaaaaaatcgctggcagaatttcttatctgtcagacatataagacttatcaaactcagggatgggagaagctggaggccttagagcagacttgggaacgagaaggagggagttaaatggtatattacatctcttcgccggtttatcaacaaaccattagttccgcccttaaagagaaagattgcatcattggagacggatttgtggacagtcactttctccttgcgaaatacatcaaggagaatattgcaaaattttcaattagtatggatgttttagtgatcgatatctccgcattggatgatagcgacgatgaagtgctgaaagcaattaaatcgatccgtacgctatatgatgaagtgcgtattattatcatggctcccacgcgtttaccgggtgataaactactatccgaacttttcggcctcggtattttaaacatcattgcaacaccggattacctaaagctaaaagaagaattatttctatgtttgggcgataagggtaagagctttaaagacgcgctggtgttcaaagaggttaaacaaaatgtagaggttgttggtaaagagcggcttaaagtcgtaagccgagtattagtaggagtcacaagcagccagtcaaggatgggcgtcactcataatattctcacatttgctgtgtatttgagaaaattgggatttctggtcgcagttgtagaaaaaaacaattcaggctctcttgaacaaattcgtattggtcataacgaaaaattacacactgaatcatattttacaatgtacggcgtggatttttatcctgctgttttagataaaacgaaaatgaaaattatattagataaaacttataactttatcctgtgtgactatggctccatccaacagtgtgataaagcggattttctgaaatgccatgaaaaaattttggttgtaggaagtaaaacgtgggagctgccttatttaaatcggattttaaaggaatatccggataatgttctacagcagtttcatatctgtttcaatttagtttacgagaaacataagaaatatttgaaacaggccatgaaatatgcggacgacaagccgatgccggtattctttctcgattataatccagaaccttttaatgcagaatcttttacagtggctgaggaaattcttgaagactacatgttaaggccaaagcaaaaagaaaaagaaggtctgttttccaggttatttaaaggaggaaaagcgtgaagcgacgatacatcggatttttagtagtgttactcttcagtcttctttgctggggaattacgggcgttgcgcttgcctctgaagagcatgaaattgagtataccgtctcttttgtcgatacatcggactataacacaaagatttttaacatgcaacgaggcaaggttgcggaaggcacagtgattaatgtctcctttccgaagcagataatcggcacagatggacatatctggaaatcggtagtggatagtccacaggtatttactgtatatcagtccggaacccacaagtattatatcgaatacgagcagggagagaaggtgacggagccagatgagccggatgcagaggaaaaggaacgactggaacgatggcttgataaagcatggaaggccgattgtgatattaccggacaggctccggacggcgaaagagattcgaatttaattattgaaaacgacttgcagaacaatacccgcattaagaacctggtttccatggttcaagaggcagaatggcattacttttacatgattgggaaaaattatcttcctcaaacactggtaataggcaccaattttgacgcggaatattcttccacaaaagaagacaccttttcgattggaaaagaaaaatataccgtgatccgcgttggagtacgccggaactggaagccggagacttgtgttcatgattgggaagtgatcagcacgataaaaaatagttgcctggaaaatggtcaggaaacttgccgctgccggagatgtctgacggaagaaacggtcttgctgccggcccttgggcaccatgacacggacagtgattcactttgtgatttatgcggccagagagcatttgaacagactgtaggagatataatccaaaccactttgaaaacgaaagagggggatatcccgcttgcattccgttgccttgatacggactataacggatctggaaaaatgctgtatttgtctgaagacgtactcggaaaggatataaccggcatttgcttccatgaagccgattataacgattccccgcttcggaactatttcaatttggcatttgccaacgacagctctatagctgctgctcttcagccaattgaacgctctgacgctgccggtcgaattgactatgcctctctattatcaaaaacggagtatgaacagtatgtacaagaagggctaattgaagcaggggaacctcatttcttgagaaccgtagacggggacaagatatatgctgtggattcgaatgaaaatatgaaccgagttttgccagcagggaatgaagattatggagcccgaccattcattttgttaaataaaccagtaacaggggaaacggcagaaccggcaaactggaaggttggggatgtacagatgcgtcaggttggaaagaaaacttatcggtttcgatgtgtggacgaagactacagtgacaaacaggacggccaccgaagatcggccctgttcctgtgcgatagcgtgattcgagctgatatagacagcactaataccgaattgaagaaactcaccttcgggacaaacaataactataagatatctagcatccggaattggttaaacaaaaatagtgcaaatagtagcttcaatctggaaccgatttccattggtgtaaatactgcttacacaggcagcacgatagccggagcttgggagcagttggatgatagtcgtttgagtcatcatgatatcgggttccagtatatgcaggatcgcttgttttgtctctccatggaagaagcacttaaatatcgcgaagaattgtggagattcggtaattcgcaaaataaccctgacagccaggttagcccctattcgcagggatattatctgcgaacaccgttttacgaggaagatgaaaggggggcttttcagtacggaagcgatatttatgtggtggatttgctgaacggaaatatccatacagcgttaacaacgagcgagacgtatggaattcggccagctttcgcattgccacaaggataaagaaaaacaggagggaataaggagaaatgaaaaaaacagttgtaaggaagggaaaaagcctagcctctacaatcttaattacggctttgcttttaacaagtaatgtaccgtcattcgctgatgggtttgtttttgaagattgggatagaggaagtgtagaaaaaagagcttcagcgagtagcgcaacagaaagcgatctggatgatgatgcggttgttgcatctggaagtgagctgccggcgacaagttccattgcactatttgcgggggcaggagttagttcactgggagatatatgggatggatggaacggagatttttctttcctggatggctcatcgggcgatggttcggagcgaaagccctatcaaatcaaaaataaaagtcagctgatgggattctcacagcttgtcgcaatggggatgcgagtccaggccggggagggcgataataatattataggttcttacgatgggaaatattttaagctcatgaacaatattgacttgggaggaatgagttggaatccaatcggattttatcaggactcttccgagttatccggagatgtagtcaataagttcttcggacattttgacggaaacgggaagacgatatcaaatttcaaactgaataatacatcgtggaatcaggtcggtttttttggagctatcgaagacgcaacgataaaaggcctgaatctgaagcctgggaagacggtatatgggaagaatcaggttgctatcctggccggaagtgcggtgaattcaaaggttagcgagtgtacggtaaacggaagtgtatcagcagccggcactgctggcggtattgtggcgacgatagacggtagtgatccgtcagagtcagtcatcgaaaattgtacagcaaatgtcacgattgatgccaacggcgggaacacaatgtttgtcggcggaatcgccggcaagtcagcaaacagtagccttgtagactgccgtgttgagactggcgataatgacacagcccggattcagggcagagacgccaccgttggaggaattacaggtttccagaatgcaacagatatctataactgctatgtatccggaacgattggaggaaccggctctcaggttgtcggggcataactggacagtatgcgtccggtcatatgaaagtagtgcggtttgaaggtaaaatcgggcaatctggtacaggtgcagcggggcataggggaaccttcatcggacaccgggaggcaggggattatttccggtatggaaacgatgtagcgtatttgtttgccgatacggaaagtaagatagcatttaatatttgcggcagtgaaattccagatgataacgaatatacttacgcagctaacattggctattcacataatggtgatgtgtattattctctggttcaggggggtgtgtcaaaagacatcgaacaatattactacgaagtcctggaagagggaattctttccatcattgacgacgaccacggcggggccgatgcggacgaagtaggatatgcaattgatcattttgccccaaatgatgctggccggccaacgagggggtatctggtcacaatacctcaaattgacacagtatcatccggaaccaattattacgatgtagcaaaattagaggttcgcggttccggcagctattatcacaccatggacaaagcgcagagaggagcagttgcaccgggaaaaagcgtgactgttacaacttccccaataatacggatgatgcaaaatttcagatggaaggagtgccgacttatacaaagagcggccgggaagttgataccacctacataaacggcggcgaatatacgttcacaatgccggcggaaaacacggaggtgaaggcggtatataagaaagtggcggtaaaagtgaccgtgctgccttccagctgcaatatcaatgtagtggaagagcggaccgggaacaggaagaatccgacaaaaacgacgcgggtaacggatcaggatggaaaacttatagctacttacatcaatgataccttgcagcaaggaacacaggtacagccgattaatattcaggcggttgtcgataccaacaatgatgttgcggacaattctgtgaaatggtccattgacgatccagaactaatcacattgagtagcaatgatgatgaagacgaaaacggctatacaaaaaagagtgcatcgattcgggtcaacctgggtgcctccttcttcaccgatacgattcgaaaattggaaaaagagcaggccgagcagaattatcaatatccgattcctgatacgatttttggagccggccatcaaaacggcggcgtggctatccttaccgcctccactaggccagcggccagttttgaaggaaaaccttgtaccggcaattgccgggttaatgtgacctatcaggtaaaggataagacctacgtagccaacgaaggggcctctcttgatagagcagagcttacttttacggtcacccggaccctgacagggaaccggaaagccccgcgggagagcataacggtgacagagccacagagcctaaccgcggcctttaatccagacttctttgaccggaaggatatcacttggtcagtagacgacacctcccttctcgccgtaagcggagaaaataaatcggccagcgttgcggcagtgaaaaatgcaaaatggattcaagacattatagcttcggacaatggaattcatagcaacgatccttatgcatctgtgagtggagccgggacaaagacagccagagtaacggtgatagcagatgacatgctggggaaccggcagacggccagctgcgacgttacgattcgattcgtgacaaacgatcagaccaggatctatgtggagggagtgacggttgctccggagactttaaaatacgagcttgtgtgtacaaaaaacggaaaccgtaataatcctgtcatcacatggaccggtaatgaagcgaagcagttgaaagtgactgtgttgccgacactggccttcaaccaggcatatcagttcaaggttaacgacgactcgctgaatatagccgatgacggaaccgtgacggtgaacactaatgcaaaatggattcaggaagctaatagaacctatccttatgcgaccacccacacggcagttatcacagctgtcacagaggatggaggatttgaatcaacctgcaatgtgacattaagttataaattgacagactcaacttatggctcctctggcggaggcggtggagggggcagctcttccggtggagggggcggtggaggaggtttctcttccggtgtaacaccgagtggcggcacaggccctgctggagcagctccggccggcagtgtgactggcacatgggtcaatactgcagacggactttgggcctttacatctgcgggccgtacttatcacagcgaatgggcatacattcacaatccgtatgccgggaagaatcagagcagtacgggttggttccgatttgatgacagcggccacatggtcgttggctggttcaccgatacagacggaaaccaatattacctttggcctgtatcggatggcacacagggccatatggtgactgactggcagtggattgttggggctgacggactggaacgcagatattactttaatccggagtcggatggaacgagaggtgctcttctgaagaaccggacgctgccagatggaaaccaggtgaatgataaaggtgaatggacagtgggaggagtaattcaagttaaggccccaggggttccggaagcaaaataggaaatagggaaaattctcaaaatagagaagctgcataaggcagcgtgggtgtaactcccactttcccattcatcaacgtataaaattcgatgtacattgacaactaaatagagattacacggttgaataataacaaatcatgggcggcttatggcacagccgcccacaatcatacatggaggtggagggttgtttttactggattatttgtttatacttcttttaggggtcaacacaggtatcattacggcctacttgatggaaggattatatggtaatacgatgatgacaattgatttttcaaatgttccggcatatatggtagctgtgatagccggaggattcctggcagcgattgcaaaatatctctttgacgaatttaaagaaaataaaaagacaggtaagattgatacaactaccacagacacaaaagtgaaggttgaaaaactggatgagaagttggattcacgggcagatagacttgaaaagagagcggatagactggaacaacaggctgataaccggtttcaaatgcagttttcaaaacttgataatattgataaattcgttgcagaatcaagagcattgaaaaatgcttccggaggccaggggattgatgtaatgcagattttagcgtctatccaggctatggcagaaacaatagcagaggttcaaaataaagcagcgactatggaacataacctaaaagagcagatatcgtctttggagatggaaaatcaaaagctgaaaagtgagaaccaaaaatacagaaaagaatttcaaaggattcgtaacagcagagttcaagatgagccagagcgttaaattagctggtaaagtaaagaggaaaagacagcggaaagaggaagagtatttaaaaagtgaaaaaacttataagccgagaggttcgcaatagcagatctcgaaatgaattgtcatagatgataatacatgataaaataaccgtgtataatagcaaagaagacagaggatagttcccggtgctccttcggaaatgaacgaaggaggaaatgactatgaatacatcagaggtattgacattagtgctggtgatgcggcactgacatacaaagacaatcatcggaaatagtaattttcatttataatgaaaagagctatcctctactggcatagaggatagctggtaactaaaaattactcacgcaatccgaaggtcatcgtggacgtcgaaatccactgatttcttctaaacttattatacacgggggcctgaaaatttcaagctccctttgttttacatataaagtaaaagattatattcctcctgttcatatggaataaccttgttgcaatgggggattatttttaataggatagtggtgatgtagatgaattgttgttcattatacatagaatttgtgtgatacagacaagagggagggtaaataacgtgataaagatagaaaatcaagaaaccgtcggtatattcaattatttgcttttacatcgtttctacattgaacataggaagaacgatagaagcggtatatatggtctgacacaaaaaatgatggcatataattcgaataaaatcgaaggaagtcgcctgaccgaagaccaaacggcttctttgttcgaaaccggaactgtgaatgcagagggcgagattatttttagagcaaaagacatagaggaaatgacaggccattttcttatgtttaatgaaattttgaaaacagtgaatgagccattgacggaaaagttaatcaaaaaataccattattgtttaaaagctggggtctttgaagatttggcgaatggatatgcagttggagaatacaaaacaagggcaaatgttgtttcaacaattacgacagcgttgccagaggaggttcctcacttgatgggaaagcttctatccgaatatcatagtaagcgtgagtgcgatttggaggatttagcaaaattccatgtacaatatgaaacaattcatccttttcaggatgggaatggtaggaccggtcggggaattctatttaaagaatgtttaaaaaataatatcactccctttattataaaggatattaacaaagcacagtattatcagggcttgaaacaggtaagtgataaaaatgactactccaaactagttcaatattttaaagaggagcaaaaagcctatttagatttggctaaggcgtttgtaataccatataacatagagacaattgagggattgagggaattattgaagtcagccatgaagcaaccccgtattcaatgccaggctgccgagcaagagatttaatataagcaaattaagcagccggaggtatagtccccccggctgcttataaaatgaagttaataatcaaataggtcgcattgaccatttattttcctttcgatggaaatataaatttatcctttgccggcggctttgattgatatattcacattgataattaatgcctaaaacaggattagattgtacgtcaataactttacaaatgggaatatcagagtaagaaccatccgaattagtatagcggaagtataagggcatacaatctccatttacattgtaacttgcaattacagggacaacggtattttgggcagggtcatatgccccgtattgtcctggaatttgagtgtgatatggcatgagtcaatctcctcctctcatgatatgattatatggaacaaatgttctgtgcacaagtgggaaaattatgaaaatataatgagacaactatctcctgtaaaaatagtgacgagcactcaggacttaagataattaaactggggttcagacatataaattggatgggctgataagtaatcttgaacaatagaaaaattgtgataagataaaagtatgttaggggtcaggagaggtagtttttatggaattgaaatatcgcatattagttggtttgatttcattgatttttggcgggggcgcatcgtatttcatatttacagatcaagatagcaaaaagcaaaaatttaattttaatccagagcgtcataatatatttgaaaatgcagggtatagcgtgtttatgtacttttcaatatcgattattgtaattatgtttttcctgcttctgtggcaaattattgttatgctcatattatcggatttcaaatatgctaatgaagtggtcagtagcgggctgagctttgcaattatgatacctctaatcgggaacatgattcataaaatttatgaattatgtttatcgaaatttccaaagcgatttgatgaattaaatgctcaagaaagaaaatggatttcagtagtagcatgtttggggatcgctatggtaagcgttaatgacaatattgaattagcattttcagctttagcactcatgtttggtaagtttttatggctggatagtacatcaaagcaattagctgaagaatttaaagaggcattgaaactgccggtcctcattttacttgctattttactctgtttgctaactggattttacatatgcatagatgaaaaatttgcggttgtctattctttcttactagggttaggctttgtaatcggtatagtgatatattgttttattcaaaaaaacaaagagaagaaaaattagaaaaaaatttaattttgacatcattcatccggggctttataacctcggatgtataataaataaaacataaaggggaaaactttttatgataaaatttaaagacaaaaaaactgatcagattaaatttcctaaacgagtcttccagaaggcagacaagaatttgtattatgtacaatttccaaataacgataaaatttattcttttaataaaaagaatgtggagttcttatcaggagaagaggagatagaatatttagagaaaaaggataggcgaatcaaccaggaagtaaacagcgatattagggaaatcagagatggggatattttggtttatgctattgaacgcgaatgttataaatgccataaaatgacagaagttatgacctatatagtgtatgctgatacttatgaaaatttgctttacccgtgggatctgaaacgcttgaatgaagagaaaacggtgggtttggcaaccttacatatggcttataaaccggtggaattttaccccataggtgtacttggagcgaacgaacgtctggatcaaaagctgatgagagcgtttcctgatagaatagaaaaacgttggagcaaaactcaaggaagaaattatgcaatgaatctctgtactcattgtggctcacagcaaggagagattcctatttatcaggagattaacgaaaaaattaagaatcaggagccattaaagattattaaaaatataagggcaaaatctataaaaggataaacctattatagaataagatcataaattatatagatagattactaaaaggattttataaataggaggtatagaagtatgaaaaagaggaaacagaatagaattttttctattatcaccacaacgatattgaccgccgccctgtttgtttccactcctctcgtgacaatggctggtcaaccaaatacagggataaatggaggacaatttacagattggaatacacttacctggacggccaacgatggaactgaaacaacttatggaagaggtccagtatttgccgatattcatccagagataacggatccggaatattacttgaaagagtattatctttatccaggggaagttattggcactgtgaacagcgcaggaatgactaaacagactgatccaactaatgctttaggggtattgaaaacttttctaaacagttttgactggattcatagcgatgaacttacaagagcagaaaaagtttttaatagaattgcaaatggacataatgggaatatatatgatacaacaggtgtatcgggatatgaaggaggctatagagtattaagggaaggaaaaggtatatgccagaatttttctgatgagttttgcggactggcaaattttgttggattagaatgcgaaacatactatccttctgatgctcatcaggcatgcttattaaagcttaatggtcaatggtttgcagtagatccaacatctggaacaccttttttatcaaatgcgaccacgtatccagtggattatgaaacagagaaaaatcgttacgcattggaatcggcttccgaacgggaaaaatataatgcagagaatccggatagcttagtaacaataattgatttgactaatcaaaagacagcggcgggtttaatttcagaagctgactgggcaagcattaatcctatggaagcagaactggatagaaagttatcagctaaggaaatttcatatggagaatatgaaaaacaaatgggcgagcttttaaagtcaatgtggtagagtagttgtagataaattatagattatgtgataaattattaatagggaataactgtgttgcgggtggttggcctcttctcacaaaagagaggaggtggtgcgcatgagtacatacgaagcaatatctttaatgttgaccttcggaatacttcttgtagcgctgatctcctatttgaaaaagtagggattacgcaaaaaaataactgcccctgacttgaccggacggagcagttattttactcaaatgtaggtcaaccacttgtgggcggttattccttttgtatgtatattataactcaaacgaaaatataattcaagacttagcatattctaaatatttaaaaaattaacaaatattaatgccttcaaccggcgctctgaaaagaacgtaggtcgagggcattttttaagttatcaggaggagaaaggatgaaaaaggttagaaagtggaaagaaagaggaaagagagcaatctcattgtttctgtcagttatgttgtgtctgatgacacttttcccctatctgccatcattgcaggtgcaggctgcggaaaaggatgttgtaacattaaccactgcacatggtgattttggtggttctcataagctttactgcatcgacaaaggaggctatgccatttggggaattgctgacgatggggatgtatacaagaagcataggccgtcagaagcagaagtaccattatcgaaaaaagaacaagagtatatattttggggcattctcacacttcaagcgtcattaggaaatgagaaggcaacaaagataatttcagctattaatatgaatgctccagcgcaaggaaaagttcaaattagaaaatatataacggaagaagacctaaaagccataatatatagctccagcgtcagaaaaaagtattcttggctagaagaggtcgctgctcatacagaagagtatttgaagatgggagggctcatcggtggcagtggtggttccactcaaagcggaaagaaaatcccagatgttattgcaaatagcacatctcctacatctgcctatcaaattagtcgttctgattttacaattcattttgacgaaggggagcggatgctgattttattcaaaaagtaccgattctcttttcgaatgataacggttcgacctacagtcctactccgaccgatggctggatttataccaaaacagataacagtattaccttctcaaatccaaatcctcaaccgcctaaagcattgattaagtttgaggtggctgggacagaatatgcatcggcaagtggcacttatacttcagaagaagagctgtttaacagctgtatgcagatatgggaatgtattacctgttccggaaatcatggcggtggaactcctccatccaccccgccctggcaacatcagcgtatggtatggttggagcttgtaatgccaacacaagaattctatgctgctcttgccggcgatcctactgtttcaccggcaggagtcggaataacctttcaggttttccggcatgaagaggatttttcatctaactataatgttcaactgtataagtatgattatgaaactgggaatccattggaaagtgcgcggtttgtcctattcgagcgatttgatgataaaggagaaattgacaccgaaaaagatggcccggtacatatttatgaaggaggagacccgtacgccagctatcacaaggataaccctgtcatatggtccggctttaggaaagttggttctgtggtgacagatgcaaacggacatgcagcacagacaataacccacggctatcactatgacaagacattctgtgacggccatccggctcccacctttgttccagtaccggaaccagaaatcgaggaagaggaggaagtaacggcttttgcggaggatgatgacgagggcggcgggattttaaacgcagaggaaattgaagcagccaaaacaatgaaccgggaattagcccaggcatggcttgactgtgtgtcagactgtgaagaacaggcctctggagattttgagggagtacatttccattggttgatgtccgatgtagaccagggagaaattgaaaatattgcaagttcaggaggcgatgagggcagcactccggacggtggaaacacttcagaaccggatgctgacacggcatatgaagaatcgggctgctatcaggacatgcaagatacttatgagaagtttatttctttaaagtacagttatgcctatacggagtttcaggcaagagacggttatattcgtcacgatctacatccggatgatctcccggttgaaataattacaaccgactcatcagaggccggagcaaatgcctcctttgccggcgaatacagtaaaaaagaaaccatggaaaacgtaacatctggctattccaaccgaaccgttacaatagagacaacggaaaaaaaggaagaggtagaaccggttcgtaaaaatgtgacagagcagctttttcaagaagcaacaacaaccaaccaggacattgtgacatatctctcgcctgaagttatggcagaagaaaatgaatcagaaaaagagcaagaggaaacgccggccgagtcagaaatcaaggtagagcaggaggagagttctgcaccggccgagatggagagtgaaataaaagaaactgaaaaggaagcgggcgaagcggagacaaaagaaaatgttgaagcggccgaaagtacagaaagacttgaaacggaggtagttgaccagaaagagcaaatggaagagagtgaaacgagtacagaagacgaagtgccggaagtggaaatttccagccggccgttggaactggttcgagcggtctatgggaaaattgcgactccttcttcagctgaaggtaagacggaatttcagtttattgatgaagatgaagaaaaggggcgaacagcttcaccatcagaagcggccacgccatcagaagctacattccgttggcttcggggaagttcatctttccgaaatccggatgtcagagaaatggaagggatgggaagtgaactcttccagccagcatatgaagaagccctatcagcagaaagcagcggagcagaggccgatcctggaccggaagataattacagccattgcaataatgcggaccgggaaggaaatgcctggcgagtttatgatcaccgaactgagggcgaatttcacatcaataaaaaggacctggatctgtctgccggcgaatcaaaccaatataacgcatacggagatacccagggcgatggaacactggaaggtgctgtttatggtttattcgcagcggaagacatatctcatccagatgggaaaacaggtgtggtttaccgagcaaacaacctggttgcaatcgcgacgacagataagaatggagacgcgtcttttcttgcaaatacagaagccccgggatttactttcgattacaacactggttccattgtgaagacagcggacggttgggcggagcacgctcccgagaacctgtatacgtcagaccgtacgtatgatgattacacagaagatggccggtatgagagaacttatcaaaataatgagaagaacaatggaaactgctggatcggccggccgctgctgatgggggattattacataaaagagttgtcacgttccgagggatatgaattatctattgggaacaaggccaatgatgtaacaaattttggacaggatttagatgtaaaagctccggaggattccgtggggtatgctgtgatttcacagccgctttttgctgatgagcagacatccgacgatgggacaggggccggccccaatgaactgttttttgcagcccgttcgaaagatacgaaggatcagaaatatgatattgtcctgtccggccttccgaaaggcgctgagttctatcgcagagaggaaggaaccagacagattgaggtgcaggtgggaaccggaacctatgaaaaggttttgttgacgaattcagacggaacccctaaatacatccgtgcagaaaatgattatcagtacccgaaatacaatgcagatggcagtctgatgatgaaagatgtgccgatgaactatattgcggagcggttccggcaggttacagtacggccattagatgaagcggtgatacaggctactttgaataaagctgagggaggaatgtcggaagaagaaaatgcggctatgcttgcccaggcattcactgctggcaatcttccgtttgtgaaaggcaaaacagaaagtgccttgcgaagaaatggaaagtcaacacccagaagcccttatcgggaggcggctacgactattccagtatttatgttggtgtatttgacagcggtgtacgggaaggtgagcgagatcagtatggattgtccggagtaacgccagggagcccggcagcttatacagtatatggttcaccgatccagaaagtggcgattgccaaacaaaaaccggacggagcatcccttaccgtgggtgatgccatcctatcaattcttaattactacgaccggaacccgttttatagctacggcggaattgacgcagttgaagactcgggaaatgattttattttctcagtgtatgccagtgtaagcgggaatccggaaaactttatggttttagggagtgatccggaaacggacagcatcatctatcatttagttccgtatattccggcagacagctccttgcctcccagatacatttacgctgcctattccaataatccggattataacgcctttggaacctatgaggattacaaagaaggagccagcggcccatcggcagttggcagtgcgacccttatcacggatgcggttgcagatccgaacgggaacctacaatcaaaaacagtaaaagaaaatgtctattatcagagcggggaattagtgcgggacagcagcggagcattgatccgggcgtttgagtaccgggaagtcacaagcacaaagctgcaggaggtacaagatgttaagtggcaaaaggtaccggcagagaggatggcggatggaacgtatgtccttccggtaaatgcagcttataccgattcctacgggactgcacatacgaacgccggtcatgaccagacaatagaattcaaggctgttctgaaggaaaaggaagtgattctgtcggctgaagatgtagcaattttaggcgctggatttattgctggccggccgatggacagcgcaagctactatgtccacgtaaaaaaggccagggcaaaagcatacctggattatcaaaatatgaacctggtgggagataacacctacgtgatactgagcagccttgtttacccagggcaagaaatcttgtggcaggatgccggcacaagagaaaagccggctcagatattcgaacgggcgatccgtcaaaaggtcaaaattgtgaaagacatacagacgacgccagaaggaacctatgggcataacaccaacgcagcttccggccatcaggacggctttacaaatggaccggggggatcggaggagaatgcgacaaaacttccaaacttccgctttaaaatctatttgaaatcgaacttggagcggctgtaccgaaatgaatcaggtgagattacatggcttgatcggaatggtaatgaagtggcaatagaggagtaccaaaaggtctatccggaaacagaaccttttagcagcgttcaaaaactttttacaaaggttcctcataaagaagattcactgacagccggttccgtgaataacaacgtttgggaggaggctataacagcaaatgacagcctatattcttatgagctgaacggaatgatagaagaaaatcagaatccaggctatacaaggctgttggaaacagaaaatcagatgattgaggatggagccggcaagacgagagaggtaaaatcctacaactacgaaaagtttttcgctgcccttcaaacggccaatcacgacaaatgggatcagaatgaaaaggacagcacctccttcaagccgtttgcctttttccgggaaatgatttttggaacaggaggaggtgaaaaggaatacccggccatccacaataattcagcggaggataaccagagcaacacatcggacccggcaaaagaaaatgcgaagcgttccgatgctgttcgtcagttcgcgattgattggtatttggacagcgaagtgaagaaactgacggaagataacgggaaaggagagagccaggctgcaggagggagtgaaacctatcaagatgagatttatgatcgggcattgtacgcagctattctaaaagcagagaattatttaagcccgttttttacttatgacctggatgaaatttactccattgcctgggatagcgaggcagacggaggaagcgacaaggatagaacaacactctcggccgatacgcttcaggaaacggccggaaatggccttgaaacagctaaggacggatatttctatggtgtgtcaaattatctgccatacggggcgtatatcgcggtggaacagcagccgtacagtgccgaattgggagatttttataacaagcattacaaaactgacaagccaaaagaaattatcctgccagcgctttatgaggaaggaggaaacgaggtctctccggagaaactaagtgctgcataccgatataacagcaccgatacgccggaaaaattacaggaaaaataccacatccgaatgaacgaggagtgggcagatacacatacagatgatttgaggaactatgtgatccgggctcacaatcatgatggggactttgagatttataaatatggcctggatgcggacaagctgacggggaagattatctatccgggcggcagttacaattatcagggctttactgtcacccagggaggatttgatccgttcaaggatgtttatgaggcagaaaacgcagctagtgattaccgaagcaatcaggaagtggagcaatattatcactatgcctctctttctgaacaagctggaactgcggataacgtgctctaccagtacgggccagcatccgatgataataatccgtccggtttatatttcaaagatggagtacgaagtatcacaggagccttaacaggatatgatggcctctacttttctgcattggttccgtgggcggtgacagaaccagtggatgccggaaggtatgacgcggccgcgtttatcggctatacagacggtaagtaccgcaatacgttctatacgtcccggctgcggatcgaaaaattggattctgagtcaggtgaaaatatcctgcatgacggtgcggtatttgccatttacagtgcagaccgtgaagacgcggaaaacagtaacggtcgggtaaagttctatgaaaaagatactgttattactggaagcaaagaatttttagaggcaatgggagctgccgatattacgccggttgccaggccgtcccttccgtggcaggtgccttataacgggaaatattatggaaccgtgccggccggcacgccgatttgtcaggagaaagagcaaattatcatgatggatgaggcaggagaaaagaccggacagttccaggcatttacaacaacgaaggatcggggcgaggaaggcagccagaatgtgggctatttagaaacaccccagccattgggagccgggtgctatgttctgtgtgagataaaggcaccggccggctatgtccggagcaaacccgtggcgattgaaatttattcgaacgaggttgcttattatttggacggagccagaaataaccgggtggtggcagcgatctatgaagaaatgataacaaggacattagataacggcgaagaaattacgaacccagacggcacaaaaccgaacgggaacaagccgcaggataaaggtgatgtggcgagaatttatctcaataacacgccgatccgtttggaggtgacaaaagcaaaacccgatgaaacaacggtatcttacgaattgaatggacgcctggagggcagcatcacagagttaaaaggccagtacggcttggaaaatctggaattagcttataatgcctccggaacctatctgggatatggttggaaaaagggcttccttgatgccttgaaaaagaaacaggctgctggcgaagtgatcgaaattatttatgaggatggtgttttcaccggaaaagctcagttggagaaaccgttagagacggccgatgatacaaaccgttatctgccgggggcggtgatgaccttgtatgatgcgattgaggtgaagcaaaacggagacagtgaggattatcagtttgacggcgtaaatgtggagcgggaccggtatggaaatgtaagcaatatctatgttcagaaaggatttgccggaacaaggctcagatttgtcttggataaaacagatgcggctggcgacggcttgaatgattatcagaactatacttttgatgatcaggaagatgacacaggaaccggcacttggacatacaagacagtggagcgagaggacacggatatcctgttttatgacctgggaggccttaccgtccttcagactgaaaagggggtactatatggttttgataaagagggaaaaaaaatacaagctaaaaacggcagctcgctctttgccctgaaaaatgggacgccggtgctggaaatcatcagcccggattatgaaaaattacgttacaacgcgaaagagcgcgtgtttgatcaagttccggaaggaacgaaactgtatcatttagactatgaagggaaccgggacagccaggttcacccctacaccggaatggcttatgtagtggaggaacctaccgggaagattctggtatggccggtgaagatatcccgggacaagtacgggaatatcactgccagagagaaaattacaaccggccggattgctacgatggatgccgatactgaagatgagtggacaattggaacaacagaagaggggaattttgaaaagaagatgaatccggttctagatgagcatgggcaaccggattattaccaaaaatcagaggaaacctatcaaaaaggaagcccagtctatgaccgggacggcgattacattcgataccgatatgatgataagctgaaagactttaatgataatgcatggagaattgacacgaatataggcttggcggatatcggtgccaatccggaggacgcggcagatgatcggcctctctatcaccgccagggagaaagctacattatcgagaatacctggacaactggtgaagaggctccgaatgatccgttccagaatggaatgacaaatggacaagtggatgtgcttaagagggttccggccggaaactacatcatggaggaattacaggcaccggaagggtattgtaaagcaatgccggtcggtgtgacggtgcgggacaacgcagaagtgcagacagcaaaagtcacagatcacccgattagcggatactttgagaaagccgatgcaccggcagcataccgattgaaagtgcttgaccgagatcaggtgttagaggaagtagaaacacgaatggaagataaagtcagttattcgtttgacagcgttatcggagccaaattggccctgtatcgggcaaaacgtatcaagacagacaacttggagcagcatccatcaggatatgtattcgaaaaggcggagaattcgccggcacaatggactgtgctggggaacgacaatcagaaacagcagtataccgctgaatggactgtaggaacagctccggagtatctggaagcgattccggccggttactacatcttagaagaaaccgacattccggccggctatgtcccttcttctatggagattaccatccgggaagatgaagaacttcagtattttgttttaccgaacgaccataccaaaattgaaatttttaaatacagagaggaggaagggaaaaaatttccattgccaaacgagacatcagctgaattggcattgtatgaagcggtcataaacgagagcggaaatggaattgtgactgaaaacggagtgccaaaacacgatgaaagtaaattgatcgtgcagtgggagacggatgattgtaaggcgtatacggaaggaaccggcagttttcgggcagaatatgagtcaatgtacggagaatacgaaactggcttccagcagtttacgtggagccagggaaccgcgcgtcgcctgtcctctgaagagacagataagagagagtctgtccggcagctatgggatatgggaaatggcaaacaggcgttgattcagacaacaaaaaatttgcttccggatggccggtatgggactgtatttgattacaaatttaattatagggagctggataagggggttagctatgatacggtcgagggccgtcatcggatcgattatctccctatcaatgggaatgatcaccatggctattatgttttggtcgaaaaacgggtgccggccggatttgccgcagctgaaccaaaggcgattgtgattgaagagaccgccgacatacagctctacggtttagaaaatgaaccaaagtatatttatgttacgaaggaaggtgaaaacggggtaacgattgaaggggcggagcttgcgctatataaggctgattcggaagggaacttgacgatggatgtcgcacacttaattgaatcgtggatatcaggggccgaaggaagatatacgatggaagattaccaaaataatttgattccagacggattccttgccggcgaattaaaaccgcactatatcagtccaatcccttacggaacctattatctggtcgagttgaaagcacctgcaggttacatcaagatggagccgcagaaaatagaaattacggcagattcgtcttctgttgtcaaagcagtcaatcatctgaaaatgggaaaagtccggattgagaaagtagatgaaaaaaaggaggaagaaaaattagccggtgctaaatttgagatcgtcaatcaggagacagaagagagtttttacttgattacggatgaaaacggacaggcggaaagcaatctgatcgctacggggacaacgggtacagacggtaaatggcaaccataccactattttgtacgagaagttattccaccggatacttatcagcttaatcttacaaaatataaattcagttttgaggatagcaacgtactgaatgaactgaaatacagcttgactgtgccagataaaccgacggaaattgttatcacgaaaacagattttaacaacggtgcctatgtaaaaggggctgagttagccgtatatcgaaccagggtggaacacggtgtctatgtagaaactggagacgcactggagacctggacgacggacggaaccgcccatcggattgtgggaaaactgagtgcgggacaggtatatatgctgaaggaggaaaaagcaccggaagggtataccaaagcgcagcccatgatcttcacgatttcagaggacggccggcgcattgtaaacataacggataacttaaatatcgtgaaatacaagacctcgaatagttacatagatgcagtggaatcaattaccgttgaaggaagacgggccagagaaattgttgtacagatgaccgatttagacaccggaaaaataattctggttccggaaggtaaagcggaattgatagaggcagatggacttgttgagggacatcggtatgaagaaaaagagatgacaaaatatacagacggaaacacaatgaccagtgaaagaaccattttccgcatgcattttaatgaaaatggaatctacagcatcgacaggagagcgattgaagatacaaaactgtcgttgacagatagtgccggggacctgatagaagaatggtcagtaaaaaacgcaaatcacggcggctatagccatacggttgaaaacccggaatttgaagaacagcaagggctcgaagtagtctctgcgaacggccggtacggtgcagccgtgatgcccggaagcattgtgaaatataacattgagtatcggaataatggcaaagcggagaaagacatccgaattgcagtaaggctggactcacagttggaatttatgccggcaaattcatctgcaggcggccgggaaatgaatggaattgttacctgggtggttccggccgtggagccggaagaaagaggaactatcactgtcacggcggcagtttccgagcaagcggagacagaaatactctcacatgcttcaattggcaccaatgattactcctgcctgaatccagttgcatcagaagggactctgacaattgctactcgagtgagtggcacagcatcggaagaactgcgaaaaatggaatgtgattatgaaattcttctaaccgatgcatcgggagtccccttaaaggggtactgtcagtataccggttccaaagaaggccgcattaagagcggggaacaaatcagtttgaagggaggggaatatatcactatctcaggcatggcctggggtacaaactataaggtgataccgcaagaagtagaatatgacagtacatctcgcggattggaaggaataactggaaagcagggagtcagcgcattaatcctgtacaggaaaaatgatttttctattcgtgaaatattcaaaaaaggaggaacctatcacttaactgagacgactgtatattccgatggtgaagatgtaacagataaactctctttcactttaaatgaaaatgcatccgtaaatggtgttgatatcaaagacaaaccgacccatgtagtgttcagtaaaacggacattacaggcggacaagagcttgcaggtgccaatatggttctgacagactcggacggtaaagaaatcgaacggtgggtatctgatgggacaccgcatgagttgattgcggtacttgaacctggtgagacatatttcctaacggaggaactacctcctgacggttacgcctttgcagagacgattgaatttacggtatcagaagacggaacgattgatcgggtacaaatggaggacaagcccacccgcattgaaatttctaagtttgacataactggggagaaggagctgccaggagcagaattggagatccgggacaaagacggaaatctgattgagtcctgggtttcggatggaacttctcatgtaatacagggaaaattgatagcaggagaaacatatagtttgatcgaaaagacagctcctgacggttacgcctttgcagagacgattgaatttacggtatctcttgacggcagagttgatagggtggaaatgtttgatcgtcccactacattaatgattgaaaaacatggtttgtcggaggatggaaaaaccgattatggtcaaattagtggagcacatatccagatccgcgataaagataaccagatagtatatgaattcgtgagcggaactgaagcggaagaagttactggtattttaaaagtgggagaggaatatcaagcaattgaaatagaagccccttatggctttgagctttcagagccagtgacatttactattcccgaaagggaacaaatcgttagaattttgatgaaagatttgaagaaaccggataaaccggttcagccaggcggtgataaggacactccaaaattaagtttcaaaaaatatgatggagtaacatttaccgcattggccggcgcagaatttactatctatcgttccgatggaactgtgtatgcgacgattcgaacgggaagtgatggacgggctactatcaccaggccaaaggctggtacttataccataagagaaacaaaggctccggacggatatttactttcggataagatacttacttttacagtaaccggttctggagagattgcgggggatgtaagtttaccaaactggaaacaacctgaaattgaaattcgaaaggaggatgttgacacaaaagaacgcttagcaggggcccattttgaaatatacgatgagagcagcaatctgtgctatcaaggcataacggatgaaaacggtgtatatcgctttgcggctctctcggccggccgctacacattgatcgaaacaaaggctccggacggctaccaactgaattcatctccgattgtatttgtggtatcagaacaaggagaggtgatcggaaatacggtgatctataacagcaaagaggttgaaaaaatcggccgtattattgccgaatatggcagcaacctgagaggaaaaggccaggcgaaacttcgagggcctgggaactggcttagaggcattcccagacttggggattatagtcatggattggctttgcttctttgcatagccgcaggaagtacggcaattctcctttggaggaggaaaaagaatggtaagaaagaaaatgagtaaagaaagattaaggttaggcagtgcttggtgcgtgctggccgtcctgtccctcttcgggggacaggaaaggtcagcctggcctatgcggccggcacgatacaaattgaaaagacttatgaaacagccgacaaggatgattcgggaaacggccagtttgaaaatgtatatgaaaaagatggagtattatacggcctcacccgtgtgacaacggaaatagttgataccatcgaaacagctggagaaagctatacctacacttcagagatatttattgacgaaccagagaaacatatgccagagcaacgcgtagagaaagaagacggcatatacgagttacagaaatcagagctgctaacaggaaaagcggatgggagaagtaagtacgcagaaacagatattacctatcaagtcgagtatattgataatttgccggcagaaggaactgtaacggtacgggacgaagatacaggaattgagcttcaggaaaagttgccggcaatccgtactataaccggagagagctattgggacgataatttttcttttccgattaccattgctgattatgacgcagaggcgtttttattgggtgatattctggttccccgaggagcagctttgattgattatgcggatgaactgctagagtatctggctttaccagaagaatattatcaggtggaggaaatcgtttgggccggtgaagaatacgacgaaggcggcatgatgtttcgggatgctgttgcctatggaaaacgaaaaatgacagaagtaaccgtcacatatggcggtgatatcatgctgccggccgttgacggccaattctaccgttgtacctacgtaaagataggaacggcaacaggaactatctacaaagtcaaggcgattgcgacatatgaagaagagtcagacgttgtacagccaaaatcctttttggactggttattagattggattttaaagcatccgattgccacattggggattttcctgcttctgttactgctggtaatcacaattattttatatgtgttaggcaaaaaagaaaaaggggaagaagaaccggagataatcggagacgatgaagaagatgagacggaggaaggaaaatggtaacaagaacaattgcgattgcagggacgcagccacatattggcaccaccacccaggcaatccagttaattcagtatttacaattaatggggaacaaggtttgctacgtcgagatgaatactaataattacatacaaaatttgcaaaatacatacgaagatatagaacgcatcgaagacggacatatcaaatttgaacatgttgaattatatgatgctaaacacataaagggcttaatgaaaaaggaatacgattatattgtgaaagattatggggatcatcagtcaggctttaatgagccatcttacattgagcaggacattaagatatttgtaggaggcgtaaaaccgaacgaggtgttttttacatacgaaattttaaagcaaccggaatttgacgacgtaagtttcatcatatcttttgttgacgccgctgctcaggaagatgtcggagcaatgtttgattatacagaaggtcatcggaaatacaaccgaagtagtagggtgtattttgcgaattatgcaccggaaccatttgagtatactggaatatcaaataagacatattctgatttgctgaatgccgggggaccatcatgagccgtgcatttaagccaatccttcaggctcgtgtgataaaagaacgaaaggaggctaaagaacaggaggccctaagaaagaagtatggaattaaaagcgataaaaaagttgaagtaaaaaaagaacatattgttacctctttgtgtaaggttttgggcgcaattctacggaaattttttatagtcctgcttatcttactagcatggaacggattggtggcgctcattcagccagacagccgcgccatgctgcaatatgtatatgcggatgtgtttcatcagttggaaatgctttttccagctattgcagagtttattaaaaactaaaggagaaaaccacaatggataaaaatacaatcatttttatagagcaagagacgttgacaaaagaagaacaggagcaaatttcaaacgaggaggaaagtgaagatggatcagaagacggaagaatttagaaaaaaaattgccgaaatgtttataagtaccctacaggcagacccccttgcgtggcgtaaaggatgggctaacagtttatgtatgcctcaaaatgcagtcactggagcaaaatacagagggattaatttcctatacttgcttatggaagcgaagcaaagagggtatgaagatttacgttttgcgacatttaagcaaattaatgacaatggctggcgcataaagaagggctctaaaggcctgcaggttgaatactggtatccatgggattataaaaagaggcagtcaatatcgtgggaagaatttagggcaagaacaacgagtgataagatgggggttaaggctcgatactattatgtttttaatgcggaggatatagagggaatacctcaactacaatcaaatgagaagacaaaaatcgaaatatcacagttggttgaaaaaatatcagaaaatatgaaagttcccattgttcacaagagtgtagaagatccgtattacagtttgccggaagacacgatatatatgccgtatcctgagcaatttgctaatgcttatgaatataatgcagctgcattacatgaagaagctcatgcaacgggagtagaatctcggttaaatagggatacttatttagattatgcaaaggaagagttagtcgctgagataacggccgcatttatggctcagcatgtccaggaagaattgacttctgtttcttttacagatcaggatatgcaaaatcatatggcctatgtccaaagctggatctcatctatccaggacaagccagaagccctattggaagcaattcgagatgctgaacaggctagtaatttgctggaatatcatggtgggatcattaccgaagctgaatatcagaaggtaaggcaaagcacgaaggaggttgcaaatgagctggtggtgaatgatgctaaaacgataaaccattcaatacccaatcaggttactaataaaacccaaagcagtataagagaaaaaaatccaaaaaaaaatatgaggccggatcgggtatttcagaaggcgcaagatagcccaaaagccccaaataacccaatggatgaagccgaacaagtcagaagcagccaaacagatgaaaccgaacgtgccagcaataaccaaacgtatgaggcaacatgtataccgacagattctaaaattgcaatccttcagttaagagaaggggaggaaaatcaaaacagacggtttatggatatgaatttactaaagatgatatgtggagagaaaccttcctgtgacaattatgaattgatttttgtgcgtaatgaaacgatcccgaaagaagccgaagagcagagggagcttttagatataatttatgaagaatttaacgaagatactattcgaccagcaaattactacggcacgagtattagtattggtgatgtcattgtcatagaaaaggagcaggaagaatatcaggcatattttgtaaatagcaaaggtttaacaaagctaccggatgactttttaagtcgggaaatgagcgagaaaatacataatggcatggatatacgtcgggaatatctttcatacgagcagcttatgcaaattggagcagaaactaatatccctatgttggataacaggatgacggagcggtattctcgaattaaggacaactatatggagatctttgagttagcagataagcgggctataactatagcagataatcataaaagttgcacgaattgcccggcaccagaggatgtaaaagaatacaatgttcaagagtttttggaccatattaaaacagatacggtgacagagaaggaaacaatggatttcattcgtgcgcatcaatgggaaattaagtcgccggttcacgatccacttggcaatgtgcttacatatcaggcagccataacaatagaagatggatggaaagcagaattacgatttcataatagttttgatccgaggatgattaatatgggcaaagggggaaatgtgcagtctgaaattgccttgtggattactccggttaatccggaagatgtagaaaaaactatggaatcaagaatgattacattatggaaacaatctagtacaagcctacgacgtggacaaaataattatttcaaaatgcaggaaaaatggaaggaaataacgggccaggaagcgattacatttgggaaagcgttatcacccgtaccgtcaggggggaggttccgcaatgagaatgagatataaaattgcatcgttgatattggctataagcttctcaacaatgctgactccaccttcctcagcgtgggcggccacaaagataaaaagcgtaaaaatacagatacgtgtagaagacattggtgaagattctgaaccagagttggatgtaatgtcaaaaagtgataaatatgaagtggttaatacagaaattacaggaggctattttgatattggagaaggaccaggagcaagacaagatgaaactgtccagaatcaagaaaatggattagctacttgcgaaattgaattatgtgcggaagatgattatagctttaacataatggagcaaaaagacattaaattgagtggaatagaggctgtctgtacaaaggcagttcggaaagataatggttctacgcttatactaacgatagagcttccgggactgcaagattatataggacggatcgagtacgcttcatttacgggtaaaatggcgcattgggaaggtgcagcaaatgcatcctcttatggaattatgttgtatcgtaatgctaaaagaattggtgcattacatgagacaggaagcacgtgttttgacttgtcccctttgatgacggaaccaggaaattatacgtataaagtctacccaatcgcgccgagtgggaaaaaaggaaaagcagtggagtcttcaacgattcaattaaatgatagcatttcatcggaagaggtgaaacaaggatggttttcagatgaaaacggatggaaatattattatgaagatggggtgtatgtacaaaacaattggattcaggataatggagattggttcttttttgatacaaacggctacatgttaaaagatacttggcagaactggaagtacaatcgatattacttcggggcagatggagtaatggttgagcagtaggaacggaggaagagatgctaaagttaacgcaaatagattttgaaaagttatatcagggtggacatcatgatttttccaacatgaattttgaggatatttatatcgaaaataaggatttgagtgattgtaattttgaaaaaagtagttttgctcattgtacatttcatgatgtttatggcagcaacgttaatttttcttctgctacatttgtgaattcatcttttgatagatttgatttatcgtctgtccgttttgataatgccgattttcatggccgatttcagtctggcaccttcagggttctatcgtgtgagtcttgtaatttctacccaccttatgcagtgagcaatagcacttttagcaatatggtgatagaaaagggaaatttcgaagattgcaatatgcgagacttacatattttagaatgctcgctgaaagatatacagattgaagactgtagctgtcaagggctgcatgtatatgtagaacgtttagattcttatgaaaataatcatgtatttgacactgtttattttaaaaattgtgaattgcaaaatgcagcaattcgcgcattgatgtcgcagtgcatctttaatgaagtagatgcaagtagcgcaagttggcagggaagccggcttataagctgcgatataagaagtagtaaattgtcaaatgccaatctacaagagtgtacactaaacgctgatttttttgatgttcaagcacagaaagcagactttaccaatgctaacatatacggctgtaaaattcaggaaagtaatttggagtcctccaattttatgaaagtaaatttaagaagaatgacttttagtaatacaatattggaccatgtggattttgcaggggcagaaatgaatggagcttatttcaataatgttcatactatcgatattaaaaatctttcatctgtatcactaaccatgggaggagctacaagagaagaagtaaagaattacgaaagaaatgtacttaatattttaaaaaaagatgtagaaggagcggaaaaagaaagaagcagggaaatatcttttgatttagaaggaaatgcacatatcgaagtaaagcttcagacactgcaggacacggaaagggttaaggaggtattgcagaacaccttggatacagaaatggagaattcaggccagatttcggatacctcacgtcaaattgtacaatcaacagggtatagcttagataaaggtaaagtggtagtggctccaactgcgcccgtacccaccagaaatgagaatgggaagtctattacaaaattgtctgcttccattgtgaaaaaaataaacattatgaaaaaagaaggattcccagtaaggatttgcccaaacggacaagtttatatggatccaaatcatttgcgttactttaaacgagatgagcttcgtgagataagtgattactacgaaaacaaagtgggaaaaacatttaaaccgaatcaagaacaacaacatagtctcccagatagcttgaagaagaaaatacatttattggagcaaagttcgggagacaaattgaaaatgaagccagatggtcgtgtaatcattccaataatgcagttgcgctattttaaaaacgaagaaatttctgctttgtgttcttattttatgaatcaagtccaagaactagaaaagcagacacaaagaaagtatccgcagttttcaggaaaaatcaataagaaattagaatatttagaagagaaaggaatgcctcttcgcatctgcccaaacggtcaggcatttatacctgaaagtgagcttaaatattttaaaagtgaggaattgcaggaaattaaccggcactatgccaaagaagctgaaaaaaactttaaggcggattgcaccattactcagctaccgatgtcattgaaagaaaaattaaaaaatatggagattaatacgggaaaaaagctcgtggtgtccagttccggaaaagcgacattgcctccggaattgttgcagaattttacagatgaagaaattagcacattaaattcctactgtataaatcgtacagcagctcaaaaaagagagaaagctacagaatcgaatgtaaaggaattaccggaaccgtgaataataaaggagcattaatgaatcaagaagaatttgaaaaaaaactgctggagggcgtaaaggattttcgtaaatgtaattttaaaagaatggaaataatcgaaaaagatttaagcggatgtaattttgaacaagcctcttttgaattttgcaaatttgagagtcttaacctacgggaactttgtatgagaggagcaaacctgtattgctgtaatctgagcagattaaaagtaaatggaggtgattggagaggagtgaggattgctgactcacgcatgagtgaaaagagagaaaatcgatggactgattttccgagaccacttgattttgaaagtcaaattcaaaaatgtgattttaaaaatgtaaatatacaaatgtgtaatatacatagtcatattatgaattgtgtgtttcaaaatgttgattttgaacacagtgatttacgtcgaagtcatttttggcaagtgatgataaaaaattcaaaaatgcagcgagtgaatttacaggaaatgtcatttacaggaactatcactaattcacttttgagagagagcgattttcgagcttcccttatacagaacagctatattaacaagtgcgatatgttagggggaagatataggaatgccttaatccgaaatgtaaaaatggagcgagatgcaatagatcggtcatttgaattagcaataaaagaaaatattagatatcaaaacgtagaaaataaaggtgcaatacttcgggaattatgaggtgaataaatatgggaaaaacgttggtcattgcagaaaagccatctgctggagctgatattgcaaaagttctgggatgcagtaaaaaagaaaagggatatatagagggagaacgctatattgtcacctgggcaatcggccatttaattggtcagaaattgccggaggagcataacacgaattataaggcgtggaagttggaagatttaccctttcactttcctcttcagcaatcattgaagatactgccaaatacagcagaacaatttaaagtaatcaaggagttaattcatcggccagatgtagaattgttgattaatgctggtgacgccggccgagagggatatttaattcaggagtggatatatcgtatggccggaaataataaaccgaaaaaggtactatgggcctcatcattaacggatgaggcactgagaaaagcatttgcaagtttaaaggagccacaagaatttgaaggattgttacgagaggcggaggccagggctcagttggattatttgttggggattaattataccagagcactttctttaaaaaatgatttatcaattaatggaaaacgtgcgattatccattacggccgatgccagactccattattaaagttgatatcggatcgagaagatgagataaaaaagtttgtacctactccttactatgaagttgaaatttcttatacgaaaggattttccggccgaatgattgatgcagaaaaaaatatagaacgttttgaatcatcagaggaggcggaaactatcatcaaagaaatggggcaatcagcggtgatcgcgtcatatcaagaagaagaaaggcgaacctctccgccaccgctatataatttagctgacctgcagaaagatatgggacgcaagtatggatacacagcagaagatacactggctattgcacaagcgctgtatgaaaagtacaaggtaattagttatcctagaacggattctaaatatttatctacggatttgtacaatgaaattgatgagcatttaaaatcactgaattttagtaattttatggcagcacttaagaatataaaacaagaaaaaatatttgacaaacggtattttaatgaccttaaagttaccgatcatcatgcattaataccaacaatcaacagtagaatcgaagttatttttaatgaattaacggaaccagagcaaagggtttttagtgcgattgcctatcgatttatagcaatattttgtcccgattatcagtataaagcaacagaaataataacagaggaatccggtcaccgtttcctgtctcggggaaatactatattgcacttgggttataaggcagtattacgaagtgatgaaaacgaagaaaaaaaagaaatgcagatattaccagaattacagacgggagatttactaagaattgaccatagtgaggttttggcaaaaaaaacaaaggctccagctgcatataatgtagcgagtattattagccttatggaatcttataacattggaacgagtgctacccgggcggaaatattgaagaaactattagggaaagtcggggacaaggtctacgaacaaaaagcatttttacgattaaataaaaatgtttatgttgtaacggaactggggaaaaaagttcttcagttaatcccagaccagttaaaagatccagagttgaccaattattatgaaacagtgttgaaaaatgttaactctggagaggtggagctcagtagcttcctgggtaagctgcttgaagaacaaaagagacagattattttatttcaggaacagaaggaagagattgttgaggaagggaaaatagtcataaaatgccctaaatgtggtcggccaattcgtgagatggaaaaagtatacagatgtagcggatggaacgaagggtgcaatttcactatctggcgaaatatagctggcaaaaaattaacaccagctcaagcagcagcattaattacaaaaggaaaaacgggtaagatttctggttttaaaaagcgtgatggaggaacattttctgcagctttaagcctggaagatggaaaagttcaatttctgttcataaataaaaaataataagcatggaggacaggcagtgagacataaattagaacaagcatagaaatgggttggtaataatgaaagtagaacatatctatcccaaaaacttcgaaagcgaagaagaaaggaaacagaggattcaagctgtctatacggagattcaaaaaatgctctataatgaaagaaaaaacatgagagcaaaggagaaaaaagagcatgtttgatgccgtatatgcaagacagtcacattttaagaaagatagcatttcgatacagactcaaatagacatggcaaaaaaattttgtacgaatcccgttcgtatttatcaagatcctgggtattctggaaaaaacacaaagcggcctgcctatcagaaactgatgaaagacatcgaaaagggggagatttcaaaagtagtagtgtataagattgatcgcttttcgcggtcaatgaatgattttgtcacagcctatgccttccttgaaaaacataacattgaatttgcctccgtgaccgaaaattttgacacagcaacacctatgggcaaaggtatgctatacataatcgttgtttttgcgcagatggaacgagaacgtacagcagaacgtgtagctgataactattatgcacgaatcaaggaaggctggtggccgggaggtcctgcaccttatggttacgatatagttaaaatggatggcgtcaacaaatccattttaatgccaaatgaaaaaatggaactggtaaagagagtgtttcaattatatagtacgcctttgacatctcttggagaaattgcaaatgcattaaatgaggaggggatattgcctccttccggttctggtttgaactcttggcaagggcttacaatacagcgaattgtttcaaatccatgctatgtaaaggcagacatatcaatttattctttttataaaagtagaggtgttacgatagatgcttcaaagaataataatatagaaaacttcaatggcgaacaagctgccttgttacttggaaaaactaacgctactgaagataagagaaccatatataacagaatttcgacatccgaagttcatttgtcacttgccaaatggcctggaataatagaatcagatgaatttttgcgatgtcaagataaacttagtagcaatcgtcaacttggaaaaaaggcagatgggaaatacacatggttaagcggattaatgaaatgcaatcgttgtaaacgcgcactcaaagttaatgcttggacaaatagtaaaggggtattgaatttgtacttaaactgtacaggccgtgttgtacatgcttgtgatgttaaaaaattcccctttcatgtagaaacagtggaacaatgtgtacaagcagagcttgaaaaaatcttgagtaactgtgaaacccaacaagaagagcctaatgaagatccagggattggaattgcactatataaaattgaggaagaaataagaaatttgatttctgtccttaaaagtaaggagtcttccaaatccatcattcgctatgtcagcgaagaaatagacaaattggaacgacaacaaaaagaactaatagaggaacaggagaaaagaagggttccgattcaatttgagccaattgttttttcagagttatcatttgatgagaaaaagaaggtggcatatacatatatcaataaaatatacgttgatcctgacgaaaaaatatgtattgattggaaattgtagtataggaacccttccttgtgaaggagcgatatatggaatttagaaaatacaagcggaagattgcggcaatgataatcggttgcctgttattaaccaatcaaacgaatgcctatggcaattttatttttattgatgaagatataggatgtgaaagaagtgttgcgtccgcttcagaagcaacggggtctgaggcaacagaatctgaggcagatgagaaatttgaacaggcaacatcttccgaggcagaaagttcatttgtggtcactgtaccggcacaagaagacatacctgactattacactgagttgtcaggagaaaatgtttattggtgttttctagatagagaaggtgagtttcagtatcgaatttatggaatgcaaaagaacgaacaaaaggagggttttattatctgcagcaaaactggagaaataaaataccctatcacatttgtttcaacggataaagaagacctgacccttgccgcttatcggtataagagtgttgagcctggaatggatgcttggaatggcttatcttttcatctgtttgaagatattgagactattcaacaaatggataaagaatttgatgaatccatggggatgaatggggatggaacaaattatggcgtttggatgctaagtaaggatttaaataattggaatgagccagtgcagtattatatgtacggacatgtgatcaattcgaatgagccagatctattagaagataagtggtatcaatgtaatgaacagggggatgtttacgacagcttatacatcaatccaaatgtaaagtatgattcatcaaacactgttaccggatattggtcaggtaataactttattattgaaggccacaaatatattgaattaggtaacagctcagacccatatatggatggttttgcgatatctgcaaatggtgctcgcacacgacgggtagatgcttatctatgtagttttacaacggatcatgatggttatgatggtgagtatatgtcaggtgatagtggagggacattatatatcaccccaggtattaaaaagagtaatggaatgtgggaagcagctgggccacgtgaacctattgcagatagctatagttggacagtaaatgaagaatactccagttctaagcgatgggcggggacagtaaaattagttttatataatttgcggagtacagaaaatgtggcggtggaaaaagtatgcctaacatatggctatactacaaaacgggcagaggggagtggaagtacatcagatgaatacgatgtatcatcacaagctgaaacgaacggcaaggcgactgtaagctttaatggaaatggagcagcaaatccatcaagcagaaccgtctataaaaactcagcaattggtacgctcccaattctttcgagaacagggtatacatttaagggctggtatacggcagcaagcggaggcagccaggtatcagaaagcacaattgttacaggaaacgtgacctactacgcgcagtggacacctattaactatacagtgaccttttccggcaatggagggagcacgagtcaatcgagccgcactgtggggtacggatccggtgtcggaacgttgccatcagccacacgaacgggatataatcttgtaggctggtatacggcgtcaagtggaggaagccagatatccgcaaacaccactattacgggcaacgttacctattacgctcaatggagcccgataacgtatacaatacggtttaacgctaatggcgggagcggaagcatgaaggatttagcggtttcctatgacagcagcaagaatttaacagctaatagttttacacggccggcctatctctttcagggatggtctacaaatgcagatggtacaggtattacatatacagatcagcaaactataaaaaatctaacaaccacgcataatcaggtgattaacctgtatgcaaagtggaagttaaacgagtgcacgattacttatgatacccagggaggcagttgtgctacatccacaaaaaaggtcatctgcaaaacagatattggttcggacgcgctgccgatagcagaacgttacggttacacattcaaggggtggagccttaaacaggacgggccacacgaattattgacaccaaacagccaaatggagagcgtggccgtgactgtatatgcgcagtggcaagctaatagctatccgattacatttgaccctgctggtggaacgctaaatgaatcattgaaaatggcatattatgattcaccccttggagaactgccagagcctacaaagacagggcagatttttactggatggaagacaagcagccgaacaagagctgttccagaaatagtaacaccgacgacagtattaacggagccagggcttgaattagtcgcgagttattccttaactgcatatacgatccatttcgatccgaacggtggggaaacggatgcggtagatatacagcgtgattatggtcagacatatggaacgctgccggccgcaagtcgaactggctatacattcaaggggtggttcacggagcgcgaaggtggcattatgatttcagcaagcagcacgacgccagcgtatgatcaaactctgtacgcgcactggatgccagttacctatcaggtgcaatacaatgcaaatggaggcagtggaaccatgctgacgcaattaatattgtatggcagcactgttgagctattgcccaataaatttagtcgcgcatatcatcggtttgataggtgggccacgtcagaaggggcggaggcgacacctatgctgatggagcacctgtaactaacctgacggatcgtgatgatataccagtcattttatatgctcaatgggtcaggacggcagctctttgcacattctacgattgggatgatacagtgttaggaaccgagtcttacgatgtcggaggaagtgttaactttccggccccgtcaagaaccggctatacctttgccggctgggaaggtatagatggagcgcctatcactgggattacggaaccaggcagttatagagcgacatataatgttaatcaatactcggcgatattcatcaatgacgatcaaaaaaatgagattaagaaaaactatggagaaccgctgggaactctccctgtggcagaaaaagaaggacatacttttataggatggaacgcggcagaagatggaaccggaggggtggttacggaagagatggttatgccggctggcggtatgacttgctatgcccagtttgttcctaacgactatactattacttttaattacatgggaggcataggaaacgaagatgagagaaatgttgtttacaatgagcctttagggaaattgccagagcccaccaaaacaggtgcggtttttaaaggttggaatacatctgaagatgcgactggatcaatggtaacagaattaacagttatgtccgccggaaatctgcaattatttgctgtgtgggaaattcaatatctaacttgccgatttttggatgatgaaggacaggaaatagagcgtttgagtgtaccgtatggacaggctgtaaccccgcaaattccaatcaaaaaaggttatgtatttaaaacgtgggataaagaacttgataatatcatagagaacacaacatttgttgcgactttcaggccagcagaatataccatatcctttagcgtgaatcaagacttgtatccggatgcagttggaagtatggagtcggtgccagcagtatacgatcagataaggaagttaccagcgaacgaaattacttataatcactttacttttacgggttggacaacatcattagatggaagcggaaagttaattaccgatgctgcaaatgtaatcaacttaactgctattgatgaagcgaatgttattctgtatgctcaatttgagcgtgtcgaatctccttgtcaatatgtggactgggataataacgttttgggtgaagaagtaataccctatggacaagatggacagttgcagctggaacctacaaggataggatatcaatttacaggatggtcgccagaaacaacaggtattacatccccgacagtttttacagcacaatatagcccccaccattatacggtaagatttgtttccaacggtggtaacggggagatggaaaaccagtctttccgctacgatgaagctgtaaatttacatcacaatgaatatcaaaaagattattacgaattcattggttggaatacagctgaggacgggacgggaatagcatacgaggacaagcagtccgtaaagaatttaaccacactgcagaacggcgaggttgtgttattcgcacagtggaagttgctttttatagaagatacaaatactggaaccaatacccgccccggtccggataaggtgcttggaacagaagatgatgaggagtattggaatggtccggatggaaaaccaggaacagctgatgatgttcctgtagagaaaggggaatcgggcgaggattatatcaacaatgggaatgggaccaatacccgccctggtccggatggaatctttgggacggccgatgaccagaattacaccaacggagccgatggccttccgggaacggccgatgatgaactgattgaaaaaggagagtcgggagaagattatatcgacaatgggaatggaaccaacacccgccctggttcggatggaatctttgggacggccgatgaccagaattacaccaacggagccgatggccttccgggaacagctgatgataaattaatcgaggaaggagagtcgggagaagattatatcgacaatggggatggaaccaacactcgccctggctcggatggaatctttgggacggccgatgaccagaactacaccaatggagctgacggccttccgggaacagccgacgatgaactgattgagagaggggagtcgggcgaggattatattaacaatgaggacggaaccaacacccgccctggtccggatggaatctttgggacggccgatgaccagaattacaccaacggagccgacggccttccgggaacggccgatgatgaactgattgaaaaaggagagtcgggagaagattatatcgacaatgggaatggaaccaacacccgccctggttcggatggaatctttgggacggccgatgaccagaattacaccaacggagccgatggccttccgggaacagctgatgataaattaatcgaggaaggagagtcgggagaagattatatcgacaatggggatggaaccaacactcgccctggcccggatggaatctttgggacggccgatgaccagaactacaccaatggagctgacggcctgccgggaacagccgacgatgaactgattgagagaggggagtcgggcgaggattatattaacaatgaggacggaaccaacacccgccctggtccggatggaatctttgggacggccgatgaccagaattacaccaacggagccgatggccttccgggaacggccgatgatgaactgattgaaaaaggagagtcgggagaagattatatcgacaatgggaatggaactaacacccgccctggttcggatggaatctttgggacggccgatgaccagaattacaccaacggagccgatggccttccgggaacagctgatgataaattaatcgagaaaggagagtctggggaactttatattgacaatggggatggaaccaacactcgccctggcccggatggaatctttgggacggccgatgatcagaactacaccaatggagccgacggccttccgggaacagctgatgataccctaatacgtcattctggcggacatagcagtgggggagggaatggttcatctggcagcggctctaacaatacaattgcgaatgggcctggaattacacctgtgtcaggtgtttggattcaaagtgcgtccggttggcagtttcaagatacatcgggtaaacaatatttaaacgagtgggcatatatttataatccctatgcaaataacaatcaaggcaaagccgactggttccgttttgacgaaaaaggagaaatgaaaacgggctggtacatagacgcagacggacacatctattatttgtggccggtatcagacggaacacgaggaactatggtgacagggtggaggtggattattggccctgatgatttaaaacgttgttactattttaacgagaagtcggatggaacgaagggggcgttattaagaaggggaaaaactcctgatggatatattgtaaatgaaaagggggagtgggttgttaatggagtagtacagacaaaatagttgccttcctaccccatcttgctatagatggggtaggaaaaaaggtatacctttattcttattaatttataaacgtatttcgtcatgaaagatagagaataaaagttttgtatagtatttattcttataagaaaaaaacattgacattttttctttcttgtgagataatgaatgtaacaagaaagggggagtaagttggaactagagtatatggttatgccagagtaagcacaaccgaccaaaatccggaacgtcagatttcggagcttagagaagcaggagttgaggaacggaatatatatgttgatcgtatatcaggtcgatcatttgatcgccccagttataatctgcttgtaggtacttcggaaacagcagcattgcttcgtcaaggcgatttgctcataatgaccagtatcgatcgaatgggacgcgactatacggaaatcaaaagagagtggcaacgactgaccgaagagctgaaggttgatgtgaaaattttggacatgccgttacttgatacaagctcgttctcggtcgagtttgaaaaaacgactctggagaaaaaatttatctctgatttggttttacagatcttatcctatgtagcggaaaaagaaagaaagcagattaaaaaaaatcaaaaagacgggattgaggttgcaagaaaagctggtaaacagatcgggagacccaaattacaatatcctgagaattggaaacaaatttatactgactggcaagatggtaaattgacaacatctgaggcagttcaggaagccggtgttgaaaaaagatcgttttacaatctggcaaaaagatatgagcgcgcaaataacatacagcgcaagcgttattacaacattaactttaaagattagaagaaagggggatttaatggcaacaggagaattacttgataagaagctccgtgaaataaggacaaaaagagaagtcctgcttcaaccagctccgaactatgaaagttataagaccatgctcgaaagaggatttttggtgcgttataactatgagtcaacggccatagagggaaacccgttaacgcaaattgaacacgatggaattcttaatcgagatcaatgtccaaacactgaccggatgcgaagtgtttatgaagcaatcaatcatgcggatgcattttgctacgtcaatcaacatgcgatagaacctttgaacgaagagaggcttcttactcttcacaaattattgatgtctcatttgttggacggaggaaagtataggacatgtaatataacggtgcgtggtgcgacccacccgtttccgccgtatacagaacttccgcaacttatgaaccaattttttaccggattagaagaaaaaaggttaagcttaacaaaatatgaattggcagcgtgggctcatgaagaatttgtaagcatccatccatttgtggatgggaacggtagaatggcacgcttaataatgaattatatcttgctttcgtatgattgtttaccaatttctgttccgattgaaaaaaaagaagaatactttaaaatgctggataattactatacggatcgcaatattatcccgctggttgaattaattatacagcaagaggaaagggaagcagaccgcgttattaaagtaatggaaccacttagttatcctctgataatcgactacaatgagctgcataatcgctatccacttaaagaagactacattaaagaattaagaatcattatggatagatatcgagaggagatagaaaaaagacgtggattttaatcaaattgacaaaaaaataatgcaactaaagaataagaatgaagcctatcatcaaatggttagccggtttctgaaaaagtatgaacaggaattttcactaaaatatgcccatgaatcaaccgtaatagaaggaaatacatgttcttacgatgaagcgcgaaaaatcctgtatgggatatatcgtgtcgatccgggagcaaccgacaggcaacgagaagtgtatgaaattcgcaatcatgcaaatacattttcgtttctgaaggacaagcttctaaggagggagcctttggacgaagatttgattcgagaaatgcaccgtcggctcgttgaaaatataatggttggcggaatttatcgtaatgaaaatgttgggattggtggttccagatatgattttcctgagtggcaggaagttccctttcagatgctcaattatgctgaagcactaaaatataaatcggccgtttgtggattgccggaaatgtcacatccgctggagctggcagcttgggcccatgaagagttcgtaagcatccatccatttcgagatggaaacggacgtacagccaggatgttgtcaaattacatattaatgcagcatggatatttaccaatttcggttccagccgaaaaaaacacagtaaacagatattatcagatccttgaagactatcatcagtcaaaagatattaagcctcttgtggagctttttggtgagttggaagaacaggagctggatcatgtgatacagattgcaaaagaaaattttatgcagtctaataaggggatagaaccttaattgcacatttaataattttatgctatgatagcatggtaaagatttctttattatttctataattctataattcttcaattcgtatttttctttactaccatttcatatgctgacagtctggactggaaagactacggcgccgattcaatcgtggatatggttctgaataatcctcatctgggcaacggaagcattattttaatgcataatggggcaaaatatacacctgacgcgctggatgcagtcataaccgggcttcaggaaaaggggtttgagctggtaacggtttccgaactgatttggaaagaaaacttttatctggaccaggagggccggcagatagctgaataggcagtaactgtcctgtccgtatcgataaaggataccggcttatgagtattggaaaatattttgtttcgtgataaacttaaaaagcagctgcgtattcggaatattgaatgcgtagatgtggaaacatagaatagtacggataggaatgaaagaaggtcagtgatggcgagggagatagtatttaaaatggaaaggccgggattggtagaggaaggccaggaagtagaggtcagcgaatcggttaccccctttaatgtcaattacatgatagaaccggctgtggcgatgtccggactttttaagctgaataaccggctgaagacagagaacgggacgacaaagggaattgtgaaaaaaatcgaggaaaatgaaagaggtttctatatcacggttatatttgaagaagaataaaaccattcacaataatggcgaattttgtaattaaatgtgaaataatgtagagaaacaattgaatttacaatggtattgtgataaagtgtgtgggaaatagcagtatgacagagaaggaaatatgacagaaaaggaagtgtgacccaagatgaaaaagataccacaagaccccattatatgcctgagctacgtgaatacacagctgcgggatttttattccagtctggaactcctgtgtgatgattttatggttgaccgggacgaactgataaaaaaactggcggatgccggtttttcttatgacagagagcaaaacagatttcgttgaccaagagcgacagacaaatgatgaataagaggaaaaacaattgcggatttacattattagaactggtcatttcagtatcagtgctggtaatattaacaggtgtcacagcgcctgttttcacaaaatatattgagaaagccagggaacagcgttatattacagaggcgaagagtgtcttccgtgcgctgcagttttacctgatggatctggatgagtcggggatagtgatatcaagagagaaactaacggaaattcttggggactatccggtttcttcaccgagacatgttctttatccatatctaacgaataaagctaccaaagaggcatatcttgcagggcaaggatttgtaaaggacagtagtgctgaaaatttaagaagtattgagtacgaagtaaaagattacattatttcggtcgaagcatcaggcaaagtcaaggtgaaaaagcgccagaagattattatccccactaagcccggcatagtaacagggatagatgggccccaccctgagacaattcaagagacggagtgagcacagtggacgtaatatcaaccatatatgatacggccgtgtctgtctgggcatggctgctggatcatataattttcgtcaatcttatactatcaataatcattgtatttttcaggaggcatgatccgaaaacggtttggacatggctgctggctttgtatttcatacctgtgttcggtatcctcttttatttattttttgatcaggatttcagaaaaagcaagatgttccgaatcaaagaggtggaggaccggctgaggtactctgcccgcaatcaggaagagtttatcaagagccaggacatggggcttctgggctctctggccggcggttatgctgatctggtgctttataatctggaggtggcaggttccgttctgacactgaataaccatgtcgagatttttaccgacggcgtggaaaaattcaaagatttaaaagaagaattaaaaaacgccaaacgttatatccatatccagtattacattattaagaacgatgaattatttgattccatgataccgatcctgcttgacaaggtgaggaacggggttgaggtaagaattttatatgacggtatgggcggtcggttcatgccaaaaagaaagtggaagatgctgaaagaagccggtatcggtattgcaatcttttttccgccggtgcttggccggcttaacttccgtgtaaattacagaaaccacagaaagatagtggtgattgacggacgggtcggttatgtgggcggctttaatatcggcagggaatatatctcaaaagatccgaagttcggttattggcgcgatacccatttaaagatatacggcgaggcggtaatcggcctccagctccgttttgcgcaggactggaattatgcggcaggggaaaatctgtttaaggacatgcgttattttaacgaggctgacggaatgcccgagccgacatcgattgacagtatggtgggaattcagattatttccagtgggccggatacgcagacgcgccagattcgtgacaattatctggaactgtttcacaaggcgagacatcacatctatatccagacaccgtactttgtgccggatgacgctgttttgtcggctatccagattgcggcaaggtcaggggttgatgtacggctgatgattccctgcaaaccggatcatccgtttgtatactgggcgacctattcgtatgtgggcgacctcttaagggcgggagccaaatgttatacctatgagaatggtttccttcatgcaaagggagtttccgtggatggatttgtaagctgttacggtacggcgaatatggacatcagaagttttgagctgaactttgaagtcaatgccgttatttacgatgaggaaacaacggaacgtctggaagaggcatttttaagtgatttggcattttgccgggagattacgccggaagattacgaggcaaggggctgctcatacgttttaaggagcagtgcagccgcctcctttctcctcttttataggaatacagtaaaaagaaggatctgactgcctgtggcgtcaggtcttctttattaatggctgtatgcccttgaatacccagtaacagctcagacggggcgctgtcactaaaatggagatttaactgaggttgggaggacgcatccggaacggaccatgtccggtgtggtgaggggggctggctgagtcttccgtccccgtggataggttgtcgtggagggggaatccggccggaatgaattcttacggggaccgtttgcacttttcgaagcgcatagccgtgctaaattcgtgagaaacctcattaagcacggatgggcttccatatcccctgcagaattgattccgcctccttccccccggtcagggtttcgccagggacggaagactcaggcgaaggttttcgcacaccggacatggtccgttccggccgctgattgtctccaaccttaaatggggagggccctgtcgcggccactacgtgtttctggcaaactgaaatcaaactttccgcaattatataaaaatggcattgaaggcatatcgaatttcccgttcacggaagctcttagtggccgcgacaaggtccgccccgcacttaacgcgtgagacattcagcggccgcaggccagtggacggggccgatacacttggcggagtctttcgtcccggcgaatacttgaccttggggtggaggggaagataaagtctgcggatgccgttgaaatccatcgctgattagcgaggtcctgtcgagcttagcagcgtgatgcatttcacagagcgggagcgtgctccgcagactttatcttcgcccgcagtcccaactcacaacaatcttcctccgggacgaaagactcataaaacaatcccaccaccccgtccgctggccgtaccggcggcgtcctcacctgcttaactaaatctccaatcagatctcagccccccccgtctgaacagtaacaatcctcaggttttacaggcattttacagacaggaaatgcttgtaaaagcgccattctttttatataatagaacagatagcgaggtgaagaaaatgatacgttttataattgtggcattaacagtaattggctttcttgttttctccgcgggatatctgcataagatgaagaagcttggcaggaccgatcaggagaagatggaacgggaaagtctgcgggttgtaaaaaaggtgttccgctttattcttaaagtatcaggagtcagcgtaaccgtgaaagggatagagaatgttccggcggggcagcccgttctctatgtgggaaatcacaggagttattttgatattctggtaggctatacgacggtgccggatttgttaggttttgtagccaaaaaagagatgaagaaatacccgtttctttcagactggatggctaacgtaaattgcctgttcctggacaggaagaacctgaaagaaggactcaagacgatattagagggaattgaaaaagtgaagaggggggtctccatctggatattcccggaaggaacgaggaacagaggagataatatcctggagctgcttccttttaaggaaggaagcttaaaaattgccgagaagtcgggatgtccggtagttccggttgcgattaccggtacggcggaggtatttgaaaaacatcttccattcataaaaccggctcacgttacgattgaatttggcgagccgtttattattaaagaactgcctccggaggaacggaagtttgtcggggcttatacaagaaagcagataatcagaatgcttgaaaaggagcagcatggacttagcggaaatcagaattaaactggatgaaatagataagcagatcgaaaatctgtttgaagagagaatgaggctctgcggtgaggtggcggagtttaaaatccggacagggaagcctgtctatgacgcaaagcgggaacaggaaaagatagaagccctcaccggtatggcggagggggactttaataaacaggcagtcggcgagctgttccttcagatgatgaccttgagccggcgctatcagtaccagactatggcagggcggattggccttacagagctgggattccagaaggtttcggagctggatacggcaggcagacgtgttgcatttcagggacttgccggagcttatgggcatgcagccgccattcagtatttcggaaaagacgcggacatccatcatgtccgcagatttgaagatttgatgatagagcttcaggaggataaggcggactttggggtgcttcccatcgagaattcttctgccggtttcgtcacggacaattacgatttgcttctgaggtatgacaattacatagtggcggagacctttgttccggtaaaacatttccttctgggaacgaaggactcaacgctggatgacatcaggcgcgtatatgcccatccacaggcgctgctgcaaagctcggagtttttgaataaaagagccggatggcagcagatcagcatggaaaataatgcggtggcagccaaaaaggtccgcgatgagaatgacaggacacaggctgccgttgccagtgaaattgcaggggagatttatgacctgaaaccattggcggaggcgatcaataacagcagggataatacaacacgctttctgattctgtcaagaaaaccggtgtacagagaggggcggagaagatcagcatctgctttgaactcccccacaaaagcggttccctctacaatatgctgggcaattttatcttcaaccatgtcaacatgaggatgattgaatcccggccggttcccggccggagctgggaataccgttttttcgttgatattgaaggcaatctggagaatccaggagtcatcaacgcactctacggaatatcccgggaggcgcagaatatgagaatcctgggcaattattgatttgatgagactttacagccggaaagagggcagcatggaagaaagaataaggaaagagaatgagataattaaagggaatcagatgatcctgtacagaaacttaaaatatcagaaactatttgacgatgtatgcacacttctggcatccgaaaaaggcgacaacagcctggatgcctatgcctgcgccaatagtctcattgaactggcagtgacctatggttttaaaggaaatctatggcactgctttttagcattctgtatggctaaccatgagaatgcctacagcacgtcatgtgagattaaaggccctgtgggaggcacgcttaatgtgctggcggcccatgatttccgtctcatgagaaaactgttttccagcgatatcgctgttctggatgaagaatccggcggaatctgggagctgatgaagaattacgagagtacctcggaggagagcagggtcttcaaccggagaatccgcaaccggattgtggagctggcggcggcgctggagcgcacggaagatgatacggcgttccaggatacggtgacggaattctatcgggaattcggggtcggtaaattcggcctgaataaagcgtttcacattaatatgaatgaaaacagcggcagagcggtaattgaaccgattaccagggtagagcatatcggcctggaagatctcgtgggctatgagatgcagaaggcaaagctgattgagaataccgaggcattcatagagggacgggctgccaacaacgttcttttgtttggtgacagcggaacgggaaaatcttccagcataaaggcaatcctgaataaatattatgacagaggattgcggatgatagaggtatataagcatcagttcagaagtctttccgatgtcctggagcagattaaggacagaaattataaatttattatttatatggatgatctttcctttgaggaatacgagatagagtataagtatctgaaagcaattattgaagggggattggggattaagccgcagaatgtcctgatttatgcgacatctaaccgccgtcatctgatccgggagaaattcagcgacaagagggagctggacgatgagctgcatgttaacgatacggttcaggagaagctgtctcttgtagcgcggtttggcgtgacaatatattacggttctcccgataagaaggaatttcagaagattgtcaaggttctggcggataaatatcacgtggagataccggaggaagaattgtatctggaggcaaataaatgggagttaagccacggaggattgtcagggaggacggccgcccagtttatcactcatttgctgggtaaattaaagctggaggagtgaaagtatggccattaaaacatttgctgcaattgacgtaggatcatttgagctggaactgggaatatacgagatttccggtaagtacggcatcagggaaattgatcacctgcgccatgtcctggctttgggaaaagatacctacaatgacggaaagatcacatatgtgctggtggacgaaatgtgccaggtcctcagggagtttatggaggttatgaaaacctacagggtgcaggattacagggcctatgccagcagcgccctgagggaggccagaaacagccagattgttctggatcagattctggtacggaccggcgtgcgggtaatcccgattaataattcggaactgaggtttatgacatacaaggcggttgcctccaaagatgcggagtttcagaaaaccgtacagacgggaacggcaattgtggatgtgggatttggcagctcccagatatccctgtttgacaaagataccctggtatcaacccagaacctgattctgggagtcctacgactcagtgagatggcggcgcactggaaggtcaattaccacatgataccggaggtgattgacgaactggtggataacgagctttatacatttaagaagatgtatctgaaggacaggcagattaagaacctgattgccaccggtgagagtatcatctatatggtcaaaaaggggatgaaggaggcaaacagggatcggtttacagccgagcagtttaaggcgttttgtaaaaagctgacctccatgtctgtggacgaaattgaagactattatgagattgagcatgactatgcggctcttctgataccgggagctattatttacaagaaggttctggatatgctgggagcggaatccgtctggattccgggaatccggctctgcgacggcattgccgcggaatatgcggaggagagccggctgattaagttccaccatgattttgaaggcgatatcctgtcgtcagcccgcaatatggccaagaggtataaatgctacgccgcacatacccaggaggtggaacggacggcggtggccctgtttaacgcaaccaggaaataccacggcctgagcaaccgggagaggctgctgctgcagatagccgccatcctgcatgcctgcgggaaatttgtcagcatcacaaagagtacggaaaatgcctatcagattatcatggctacggagattatcggcctgtcccacctggagcgggagattgtagccaatgtcgtgcggtataatattcaggaatttgcctacgacggagtgattctggaatctgatttctcccgccatgggggcatgaatatatccagacgggaactgaccatcctcattgccaagctgaccgctatcctgcgtctggccaactccatggacaggggacataaacaaaaactgtcagattttaaggtggcggtcagggaaggaagcctggttgtaacgaccggctatacggacagtattgtactggaacgtttttcctttgagcagaaggcagatttctttgaggaaatcttcggtatccgtccggtactcagacagaaaagggggatctaaacgatggcagagatatcatccaaatatttgagtcctgaaaattatgttaaccgagaattgagctggctggaattcaactaccgtgttctgggagaagccagagacaagacgacgcctctgttcgaccggttgaaattcttaagcattacggcatccaacctggatgaatttttcatggtgcgcgtggcttcactgaaggatatgatccatgccggatatacaaagccagatatagccggaatgacggcgtcaaaacagcttgaggctatcggagtgaagacgcatgaactggtggcagatcagtacaggacatataacaggggattactgcctgctctcaaacagaatggtcttaagattataaccagccatgaaaatcttaccaggagagaagcgatttatgtggataaatacttcgaagaagtggtttatccggtgctgaccccgatggcggtggattcgtccagaccctttccgctgattcgcaataaatccctaaacattgccgctctggtgagaaagaaaaagggcgacggcgagctggattttgccatggtccgtgtgccgaccggacttcccagagtcgttgtcataccgaatggggagaagaacgggaaggacgagagccaggagcagaatgagacgaaaacgacaatcatttatctggaagaggttatcgagagaaatatcgacaagctgttcctgaattacgatatcatctgttcccaccccttccgcgtcatgagaaatgccgatctgagcattgacgaggacgaggcggaagatttgctcaaggagattgaaaagcagcttaaaaaacgccagtggggcgaggcaatccgactggatattgaagagaaagcggataaacgcctgcttgacatcctgaaaaatgagctggaagtgacaaatgatgaaatttatgaaatcagcggccctctggatttgacggttctgatgaaggtttacggacttcccggctttgacgcgctcaaggcgcccggttatacgccccagccggtgccggccctgatgaatgacgatgacatttttacaaatatcagaaaaggagatatccttttaacacatccgttcgaaacatttgagcctgtggtagactttatcaagaaagcggcaaaagacccggatgttctggccatcaagcagacattataccgagtcagcggaaattccccgattattgcggcgctcgcggaggctgcggataacggaaaacaggtttccgtgcttgtggagctgaaagccaggttcgatgaggaaaacaatattatatgggcgaaaatgctggaaaaagcgggctgccacgttatttacggcctgctgggacttaaaacccacagtaaaatcactttgattgtcaggaaggaagaggaaggaatccgccgttacgttcacctgggaacaggaaattacaatgataccacggcgaagctctacaccgactgcggccttttcacctgcgatccgcagataggagaggacgcaactgccgtattcaatatgctttccggctattcagagcctcttggctggaataagctgtcactcgccccgctgtggctgcgaggcaaattcctgcgcctgattcagagggagacgcggaacgcaaaaaacggcaagccggccagaattatcgtaaagatgaattccctctgcgacaaagaaatcatcgccaatctttacgaggcctcctgtgcgggggtaaagattgatatgattgtcaggggaatctgctgtctgaaagcaggtgttccggggctgagcgaaaatatcacggtctgctcgattatcggtaatttccttgagcacagccgtatcttcttctttgagaacagcggagaccagaagctgttcatgggaagtgcggactggatgccccggaatctcgaccgccgtgtggaaattctctttccggtggaggatgagaagctgaaagagcgcctgctccatatcctggatgtccagttaaacgacaatgtgaaggcccattttttacagcctgacggaacttatgcaaagaaggataagagaggcaaaactctggttatttctcaggaagttttctgcgaggaggcgcttcaggctgccaaagcaagggaagagatgacggatccggtgaaaaacagggtgtttattccattggaacagtagagatttaaatgaggtctggaggacgcgtccggaacggatcatgtccggtgtggcgaggggctgactgagtcttccgtccccggtttggaggttgtcgtgaggggggaatccggccggaacgaattgctgcggggaccgtttgcactctttggagtacgaggcagtgctaagctcgtgaggaacctcgctaagcaccggcggactcccatgtcccctccgcaattgattccgcctacttccccgggtcaggtttccgacggggacggaagactcaggcgaaggttttcgcacaccggtcatggtccgtttcgggcgccgattgtctccaaccttaaatggggagggccctgtcgcagccccagaccacggcaatcttcccccgggacgaaagactcatatacacaccccaccaccccgtctgttagcctgtggcggcgtcctcacgtagttgaggaaacatctgacaaaaatgtaagataaatttaaagcaaaattcctttccatatggtaaactaaagctgtatgatttcctgagagtgataaaggcgggaaaatgacagaaagattactaatgagggaggattttttatgtcagaaattaacatcctggtagtggatgatgaaaaagagattgcggaactggtagaaatctatctggtcagtgacggatataaagtatacaaggcggataacgcacaggcgggacttgacattcttgagaaggagacgattcatctcgtccttctggacatcatgatgcccgggatggacggccttgagatgtgcaagacgatcagggagacgaataatattccgatcatcatgctgagcgcccgctccacggatcttgataagatactgggactgggaacgggggccgacgattatgtagtgaagccgttcaatcctctggaactgacggccagagtgaagtcgcagcttcgcagatacactcagttaaacccgcagagcaatgtcagctcttcggctaagaatgagatctccatcaagggactgattatcaacaaggataaccacaaggttatagtgtacggggaagagattaaactgacgccaattgaatttgatatcctctatcttctggcttccaatcccgggcgtgtgttcagcacggatgaaatttttgagaaggtgtggaatgagaaggtatacgaggccaataacacagtaatggtacatatccggcgccttcgaggaaagatgaaagaggacaccagacagaataagatcattaccaccgtttgggggtaggatacaaaattgaaaagtaatgatatgagcagacggtttcgcactaaaatcgttacgaatatattttacagtgcagtgataacctgcctgatagaggtatttctcattgccaatgtatcgatgattgtaagttatctgaaagagacgagatacgcagattcatttcttcttcagatgacggaaatcaatacgctgatggtactcatatatgtgatcctggggatcgccgtgtttaccgtcacatttctgacactgctggaaaaggctctgcgttacatagggaagatatcttccgccattcagaacatatcggaaggcgatttgaatacaacggtggaagtgattggtgatgacgagtttactcaaatggcggtgaaccttaataagatgatggaagatatccggcgcctgatggacaaagagagggaggcggagcggacaaagaatgagcttattactaatgtggcgcatgatttgagaacgcctcttacttcgattatcgggtatctggagctgctttccggtaaagtgcagatcccccaggagatgcagaaaaaatatattgatattgcatatgcaaaatcaaaacgtcttgagaagctgattgaggatttgttcggctttaccaagatgaattacggaaagatgacgatgcatgtggggaaggtggatgttgttaagctgttaagccagcttttggaagagttttatccgagcttcgtggataaaaacctgtcctatgaacttcagagcaatgtgccgggcaaagtcatcaccgcagacgggaatctgctggcgcgcctgttcgataatctaatcaataatgcgattaaatacggggctgacggaaaacgtgtcctggtaaagatccaggttacggaaccgacggtgacggtttcggtcaccaattatggatatgtaattccggctgatgaacttccgctgatatttaataaattttaccgggtagagcagtcgcgttccacaaatacaggcggtaccgggctgggactggctatttccaagaatattgtggatatgcacggcggctcaatccaggtgaccagcgatttaaacggcacggtatttaccgttaagcttaagacaaactttgacgtaaacaaagagaacttcgatacgccggcgtagagcgtgtctctgagccgaaggacgcaaaggaagaatagaaatgaaggaatatataacgcggggaaaaagagggtatggcctcttttttgccttattagcactgataattctggcaggagttctgctgcatccgctcaggaccctggctgccgcccaggcgggaaaggaatcctctgtcggaatggaggttacctatggatttgatgatactgcgaaaggcaaccgttatctacagataaaggttcagatggagaaccgcagggaatcggattttaccggaaagcttgaaatattgactacggagtcgagcatggaggtgtaccggtatgactatccggtttcccttgctgccctgggacaggatgaaaaaatcgtctatcttcctctgggaatcaaaacagatcagctttttgtcagcattacggatgaaagcggcagtgaggtgatccgaaaacggcttaagcttaacatcagcggagatgttgcggaaacatttgtcggcgtattcagtgacagaccggaagaacttcagttcatggacgaagtgggaatccactatggttccattaaaataaagcaggtttttcttgataaggattcggctcctgaggatgccctcggctatgatcagcttgatatgattcttgtctcggattacgatttaaaccagctttccgaaaatcagcaccaggccgtcagccgttttgttgacaatggcggaactctgctgattggaggggagcaaggtacaaagaggccatgggacgttttgcatccgagcttctggaaccgccgcttgaggaagctgttatgcaggaaatcaacctgggagcggaatattcgcagaatgcccctcaggatgccgttatggagatggtctgtgcgaacatcggcctgaaaaacggggccaccctgatgccgggagatgcttttccgcttctttcctatgtccacagaaaagagggcagaattgttgtcgctgcttttgaactgaaagatatccggggattttgtgagacacatcccgccttcatggagaaattctatacgatggccatgggggaagtgaaaacaaatgaactggcccagatggaatattcgggatttgccagcctttatttcgccgtgcaggggctgattaacaccggagatgcgggaagactgccgaatattattctctatactattataattcttgtttacctgatgctgatcgggccgggaatttatctttatctgaagaaacgctccattcaccggtattatatgggaggcgtaactgcctgtgcactgatttttaccggcatcatctatattatgggaatgaagacgagattcagggaacccttttttacgtatgctacaatactagacgtgtccggcagccaggcggaggaagatacttatatcaatgtcagaagtccctacaacaaaccgtatacggttaagctcaatccggaatatacggtgcggccggtgacgaaggggtattattatgattcatttactgccgcccgctttacaggcgaggaggattataaaacgaacatctgttatcttccggacagaacggagattaagatacgcgatacggttgcctttacgccaaagctgtttatgcttcaaaagcagctgaataaaaggcaaaatccgggaattgacggcaaagtgatatcctacggcgggaaactggagggaacactcacgaaccggctggatcataggctggaggatgcggttttgcttctctacggccgtgcagtccttctgggagacttggaacccggacaggaagtaaaactggacgatttggagattctgaattatccgctgaattatacgtacgccctggcccagagagttaccggaggggatcagtatgaaaagacggatatcgacgacgaagattatatgcgttcccaggagcgcagccggcttctgtccttttatctcgactcaaatctgaatgaatatacgccggaagccacgattgtagctttcaatccggagaaaaaggaagaatttcttgaagaagacgactttgttacggaaggccttacgatagtgacatcaaaggtggagcttgtcagggagaggaacggaatcatttaccggacggccatggaacaggatccgaaggtgatatccggaaattatcaggcgagatataacagtatgtacacgggagagcctgcggaacctgcgattattgaatattccctgggtaatgacctcgaaatcatgcaggttgacttcatgcccctgtcaccggtatttattaataacccgcggtacccgtatctgaatctgtttaccgggaagatgtatttctataattatgatacgggccgcaatgacctgatagaggaaaagcagagctatacggctgacgaactgaaaccttatctgtctcctgccaatacgctgacggtgaagtatgtcagtgaaggtacgaatgaatatggctgggacagacagcttccgatgctttacgtcacagggagggaaaaataatgctggaaatcagaggtttacggaaaaaatacggcaattttcaggcccttgacggcttagatctggagataccgaaaggagagctgtttggttttgtcggacctaacggagcgggcaagaccactaccctgaagattgtggcaggccttctggctccggacgaaggggaggtcaggattgacggcgtcgatgccgtcaggaataacaaagccctgagggaaaaaatcggctatgtcccggatttcttcggagtctacgataatctgaaggtatcggaatatatggagttttttgcatcatgctatggaatagagggactgatggccaggaaacggtgcggtcttttgctggagcaggtaaagctggaggataaggctgaatttttcgtggacggtctttccaggggcatgaagcagagactttgtctggccagggcgctgattcatgagcctgatttgctgattctggatgagccggcttccggcctggatccaagaaccagagtggaatatacgaccatgctgaaggaactgagggagcaggggaaaacgctgatggtaagctcccatatgctgtcggagctgtcggaactgtgtaccagcatcggcattattgagcagggacgtatggttttacagggcagcatgtcccagatttttgagagggtgaactcctcaaatccactgctgatatccatattcagcaataaagagaaagccttggccatattaaaaagccatccctgcgtccagaccatatcggtaaaagaagatgagattaaggttggattcatcggtgaccggcaggacgaggcgatgctgcttcagcagatgatagatgcggatgttatgatcagcggttttatgagagaaaagggtagtctggaaacactgtttatgcagattaccggtcatgaaggagagaaggcggtgctgaaacatgaaaatgaatccggtttataaaagagaactgactgtcagcagccgcagtatccgtatggcgctgatattactgatatttaacagtgtactggcgatagttgccctgtttaatatgtttacggtggtagagcaggttaaggtaacggcggaaatacagtattcgcggtttttggagctgtatacctttgtctcgtccatcgagtttttaatgctgatgtttattatgccggcattgacggccagcagtatcagcggcgagcgggaaaggcagacactggagctgatgctgacgaccacaatgaagccgaaagaaataattctgggtaaattctggtcggccctcactacgatgctgatcctcgctatatccgctttgccggtacagtcgctggtgtttgtttatggcggaattacaatcgcagatatgatgatactgtttttgtgctacggaatcgtagcgctgtttacagggggaatcggcatgttttattcatccctgctgaagcgttctacggttgccactgtctgcacttatgtcacgatagtcctgcttgtggccggaacttatgcaattaatgtatttacataccgtctggatgcaaatgaggtcaattcttatgtttcggtcttaaacaccgccgccaggcaggcaagttcaggaggttttatttatcttctcctgctgaacccggctctgacgttctattcggttattaacggacaggccggcgcaggagatatacgtaagccctttgaacagtggttcggcgctctgccggacaactatatcatggatcactggtcggctgtgagcctgtctgtccagctgatccttgcgattattctgattgcgatttcaatctatgcggttacgccaatccacggaaaaagggaaaaagcgcaccagcatgagaagttcagaggttttgaaagagaaaaaaggagacagccatgttaagaatcggatgccatttgtcatcctctaaaggatatcaggcaatgggaaaggaagcggaaaagattggtgcggggacatttcagttctttaccagaaatccaagaggaggaagcgctaaaaagatagatcccgacgatgcggagcagtttcttgcatttgcctcggaaaagggaatcgaaaagatactggcccatgcgccctatacgctgaacggctgttctgcggatgagaacatcaggcggtttgccagagagacgatggaagatgatttaaacagaatggaatatacgcccggaaactgttacaattttcatcccggcagccatgtgaagcagggaacggagaaggggatcgaatatattgcagagatgctgaacctgattttgaaaccggagcagagcaccacggttctgttggaaacaatggccggtaagggcagtgaagtgggcagggaatttgaggagcttcgggaaatactggaccgggtggagctaaaggataagatgggcgtctgccttgatacctgccacgtttgggacggcggatatgatattgtcggtgacttggatggagtcctgaaccatttcgacgatgtaatcggacttggcagactgagagcgattcatctaaatgacagcatgaacccgctgggggcgcataaggaccgccatgcgaaaatcggggaagggcatatcggccttgaagctatggtcagaattattaatcatccggcgctcagggaactgcctttttatctggagacgccaaatgatctcgacggatatgcaagggaaattgcattattgaaatcaaagtacagggaataacggtaacagttcatttgtctgaactgttacgaataacatgacagaagcggtgcctgccggaggcaccggctgggacaggaggaatcggaatgggaattatcagagcggcagcagaagcattgggaacatccctggcagatcagtggctggaggttatagaggcggaggatatgagcgaccgcacggtctttacgaagggcgtaaagataagaaacgggcagaataaaaaaggactggacgatgtggtgtcaaatggttcggtgattcacgtgtatccaaatcagtttatgatgctggtggatggcggcaaggttgtggattatactgcggaggaagggtactataaggtggataattcctccatgccgtcgctgtttaacggcaatttcggggaagcactgaaggagaccttcggcagaatccggtttggtggccagacaccgtcaaaacagatggtattttttatcaatctgcaggaaatcaaaggaatccgtttcggcacaagaacgccaatcaattactttgataatttctataatgccgagctgtttctgagggcgcatggaacctattcaatcaaggttacggaaccgcttaagttctattccgaggtgattccaaagaatgaggatcacgttgaaatagacgttatcaatgagcagtatctggcggaatttttatcggcgctccaatcttcgattaaccagatgtcggctgacggcacgagaatttcatttgtaagttcgaagagccgtgaactggggcagtatatggctaccacgctggactgcgactggaatcagatgagaggaatggaaattcaggcggtggggattgcaagcatttcctacgacgaagaatcacagaagcttattaatatgagaaaccagggggcgatgctgggagatccggctgtccgggaaggatatgtccagggctcggtggcccgggggatggaagcggccggttccaatgcaaacggctcgatggcaggctttatgggcatgggagtcgggatgaatgcaggcggcggtttcatgggagccgcatctgccgccaacatgcagcagatgcagatgaatcagggaatgaatcaggcggctccttttcagcctggtatggaccggcagccgggaacggcacagccgtccggtatgccgtcatctcctgctcagccttccgtctggacctgcggctgtgggacggtcaatacgggtaaattttgttccgaatgcggttcacccaggccggcagcagagtggacctgcagctgcggcagcataaataagggaaagttctgttcagaatgtggaaaacccaggccgtaaaaccggtatcagtggataatgaatcgaagcgcaggtgaagccagaaatgaatacaattacatataagtgtcccaactgtgacggcggtctggtatttgatccgaagtcgcagaaattcaagtgtgagtactgtctgtctgaatttacagaaggagaactggagcggctgccggaagaaccgacggaagcatcagccggacagccggagagcgaagcggcaatggttctttaccaatgtcccagctgcggagcggagattgtcactgaggagacgactgccgcaacgttctgttattactgccataatccggtggtaatctcagggaagctggagggccgttacaggccggattacgttgtcccttttgagatggaccgaaataaggcggaagaaatctttaaaagctggatcaggcgtaaaaagtatgttccaaaagatttttattctccaaagcagattgagatgatggagggaatttattatccctactggttatacagctgtaaggtggacggccggattgatgccgagggtgtccgccgcagaacgacaagaacagggagcatggaattcctggaaaccagcaggtatcaggttgagcggaaagggctgatggaagtcagaaatgtatccagaaatgccctgaaaaaggcggatcgcaggttgtcggagaatgttcttccattcgatatggagaagctgaagccctttcaggccggttatctgtccggcttcaaggctgaacgccgggacatggagaaggaagaatttacagaagaaattgagacggaaatccgcgattatgcggttgcttccctgaaaaacagtatttccggctatgacagtatcaatgtaaaaaaccatgaagagaaaatcacatcgccggagtggggctataccctccttccggtctgggtcctgacctacaaggataaaaaggaagacaagatgtattactttgcaatgaacggccagagcggcaaaatctgcggcgtgcttcctgtggattacggaaggctggccgggctgtttgctcttgtcttctttccggttctgattatgctgctgataggagggtatctgatatgagaacagccgtccgaaaaaacagttttgccaaagtcctccgtctcgggttcctgacggttcttctgtcggtactgctgtgtatggcaatgccgtgggcagtcattgcaggagagcagcgtgtctttgacaatgccaagctctttgacgcaagtgaaaaagaagagctggaacagaagctgtcttccttccgggaggaatggcagatggatctgggcgtcctcacgacagagagtacgggccggaaaacagtggaaagctttgcagatgatttctatgatcagcagggaatgggagagggaagcagccacagcggcgccctgatcatcattgatatgggcagccgggagctttatatttccactctcggagatatggcagattatctgacggatgagcggatcgaggctgtattagacagcgcttacggttatgcatcggaagcggattatgccgggtgcgcggctgcggcggtggaccgtattgcctcttacatggacgacggcgttcccgccggtcagtatgactatatcaggaaagactacaggccgtcccttgaatggtatgaaatactttttgccgttgccatagcggcggctgcggcggttatgccgtgtatcggcgtaataaaccagtataagatgaaaaaagagcggagacagtctctgaattaccatttttcatacaggggaagcagtgatttcaagtatgatgtggtcaatgacatgtttataaataagatggttacccagagaaggataccaagaaatacgggaggctccggcccgggcggccggggctcgggaagctttgccggccgtacaacccttcacaggagcagcagtggaaggatgcacggcggcggaggccggaagttctgacaaattagaatataagattaatcagggaacagagaatgattccgatgaccgtgggaagcagaaatgccactacggtccagcggatacttcctgtttccttttttactgtgaggcaggtggtagaacagggccagtgaaaaagtgaaaagacagccatacataccgctgttttaatcgtccatccctgtgcggcgaagaggcccatcagagcagagggatccgacatttcaaccagacatcccgtctgcaggtagcccattaaaataatgggaattacaatctcattcgcagggaaccccagaataaagcccaccataatcattccgtccatccccataaagcggccgaagggctcgaggaaggaggacagatgggacagaaggctctggccgtcgataaacaggttgccggccagccagatgatgaggccggccggtgcagctacgcagacagcgcgggccaggacgaacagggttctgtcgaaaatagagcgtacgacgactttaccgaattgcggacgcctgtaaggcggcagctccagcgtgaaggaggacggcatgcctttcaggattgttttggacagaagcagggacgacagcagcgtggcgagaacgccgaggagaataaaaccggtaaggacagcggctgtgactaaggatgcccggaatccgccgctctttgccccgattcccataaaaaacagagtgatcagcatgatgagagtggggaaacgtccgttacatggaaccatggagttggtcaggatggcaatcagtctttcacggggagagtcgataatccggcagccgacaacaccggcagcgttacagccgaagcccatagccatgagtggtcattgatgcccgtccccgtcagcttcctgcttccggcaggttcggctttttaactgttctttacactgcaggaacaattgttctgtgacaatcggcggatgggtgtcgggaacccggatcctctcatgctccggaacggtcagggacgcagaactcttaaatgagagcttttttgtttttccctgcaccatatgacccagataaaccgggttatgaagtatctttataatggtgttggcagtccactggccggagcggctgaagcggtccggattcaggcccggatgcttcaggcagcggtagatagacggacagggaatcttttcattatttaattcggcggccagtgctgagggcagaaccccgcgggacgcatcaagaaaaaggcggagcacaataggagcggtctcaggatcgggagtcagctgatggcgctcttttccgcattttcggtatccatagggggcgaaattaccaatataggagccttcttccatccgtacctgcagggaagccctgattttacgggaaatatcacgggcatacatttcattaaccacattgcggaacgggattaaatccgtgcttgagaacgctgaatcatatccgtccccgacagcgatgaacctgactccgcgggagggaaagaacagctccgtatattgtcctgttttaatgtaatcgcgtcccaggcgtgacaggtcttttgtcagcaccagtccgatctcctttttttcaatatcttcgatcatcctcttaaagccgggccggtcgaaggaagtgccggagtagccgtcatctacatattcccgtattacggtcagaccatgttctgcggcgtagcggagaagcatttttctctgattggcaatacttaagctttctttggcgccttcatcgtcctttgaaaggcgcagatagatggctccaggcagaaatgatttgtcagaaaaagatggatacataaagaacctcttttcaatctgttcagaacattttatgccggaatcttaaatttcaattacagagtgataaaattaaagaaaaacagttgtgtcatcatggtaaaaatagtatgataagcctgtagaatcaggcctttgaatgaggaaaagacagccgggccatgagcgtgaagacggataagtacggaaagaggaattgatacatatggcaatactgatgacaggattgtgcgaaaagggcgtggaactgatatggaaacagtgcaatgaagaattgtaccctcagggcattgaatacctggaagaagcggcacacgccggggatgcggaaggctggtttttccttggcaactgctatagctggggagacggcgccgtcggtttcagtgataaaaaagcatacgaatgttacaagaaaggcatagagggcggaagcgtccgctgtgtgctggggcggcaagggcaggccagtttgacgaagagcttaagaaagcctcaccctgcaccctggaggagagctatcgggccgtgcttcagtctgctgaagagggcgacgcattctccgcattccagatcgcggcggcttatgagtgggaggcaatcttcgatttgctccagccggaggagcagaaacgcgagaattgctataaatggtacgaacaggcggcaaaaggcgggatcgtttccgctatggtgaaagttggaaaatgctgcttaaacggccagtatgtaccgaaaaatgaagagatggcccttaagtgggccgatcgctgcgcagcgctgggaaatgcctggggactatacagaatggggctgcaccatctgaatctcgggaatatggaggctgcctgggaatattttgaagcagcggccaaacagggggccctaaaggcgtttctgcatctggggcgcatgtacctgaacggtcagggaacggaacgtgatatcggaaaggctgtcgaagctctggaacaggcggctaaggcggaggaaccggagagctttgcagagctgggaaatattttctaccgggatgaagtggtggaacgtgacgatgagaaggctttttactggtacagccgtgcttatgcggcaggacagaagcagacggccctgccccttgcccatctgtatctgagggcgtctgaaatccaggatctccagatggcggaaaaattgtttaaagaagcggccgatatggaaaaggacggctgcgcaagccttgtactcgggaatatgagccgtgacggaatcggtggtataccggacatagaacaggcggtatcctggtatgagaagggcgcggatatggggaatgcggagtgcatggagatactcggatgcctgtatttccagggagaggacggattagatacggattatgttaaagccttttcctggctggaccagtgccataaggcaggaacattacagtcttactccaagctggcttttttatatatgaagggctatggatgtgatattgatgaggagagagccagagaattgtttgaaaaggcggcagagacagagtgcgacggatatgccttttacgagctgggctacctctatgagcgcaaaaacgaatcaccggaggatttggagaaagctgcgcagtattacaggcgcgctgttgaaatgggaaatgaaagtgccggacggaggttttcacatttcaaaaagggaatgttcgggaaatggaaagtgatttattagattccggcgttgactaagcacatggtaaggcactgcttgccgcaggccttacattttttaaaggcacaatccatattgaatgctgcccttggaagatatccgagatcttccagcagtgtaaagagcgggaagaagatcgccatggggggaagcatgacggatacaacccaggcaacgaccctgaaaacgccgtatatcagggaactgacaacccattccggagcgccgatccccgtgagggcggcagccagccaggtttccagcctgaagagctgatcccacaggaaggaagacggataattcgctccggtgatggtgagccagaagatgccgagcaaaagggcaaccataatcagggatccggtaaaacggccggtaatgagacgatctatccgttcctgccgtttcaggtaagccggatttctgtaggtgacggcctgggcggtaagggcggcaggagaaaaatcgggaatcagtgttttcagggaagctttttcaggggcggaacagccgtctgtggaggtgtccggttcactgcctttggaagacagggattcacggccggaacctgagtaggaataaagctccagcccgtctgtgccggagcagcagaagggacatccgctgcaggaagcgggaaataccggttggttttctgcttcgcccgtatccggcttccggcagcagccgcacatctgaaaagaggaagaacagcggcagtcttctttgatgctctccgtatcatttagcctctcctgtctcgtacaggccgcgctgaggcaggctccatatatttcttcctttaatttgtctaatccatggcggtttctggccgtgcatggaatcacaggtatgttcagtttctctgaaagcagatcgaaattcagttcaattccctttttagccgcctcatcacagaggttaacacagagaatgacgcgtgtaagcagcgaatcctccaaatcgcggatttgctttaacaggcgcaggccgcgttccgggcaggtagcgtcgcagacgactaacagcaggtcgggttctccggatacaatatattctctggcgatttcctcttcctccgagtgtgttctgagagagtaggtaccgggcaaatcgacgatcagacaggaaacatctttataatggaactggccgctgcagcaggccacggtttttcccgaccagtttccggtgtgctgatgcatttttgtcagtgcattgaaaatagtgcttttacccacgttaggggttccggcaagtccgatggtaaagagcttttgctgactcataaacaggattcctccatttccgtttcattttctttgataaataccagatcggcatcctcgcggcgaagagcgataacagcgcccttaatgaggaatgcggagagttcatccccgcatttttttaagatacaggtaacacgggttccgggttcaaaacccaggtcaaggagtcttccggtaatggatttattgtctgacagccagcaaatctctgcggtctgtccgatattcattttacttaggggatataacatagtctcacatcacaaaatgataggtttattattagatatgtcttgagacgggctggggtgcctggcaacaggaaagccggggacagattataaaatcacgttcaccggcatatcaattttcatcgtatgttccgtcacaatacagtcccgggccagaatacgtacgcccgactctgaggcaagcttcagggcgtcggcaaattctggatgggtgtttcggttgggagagaaggaaaggatgcctttcatctgtatcacgaaaagtatatatgcgcggtatccctccagagcagcttcccttaattccataatatgcttaacgccgcgttcggttggtgcgtcaggaaacatggcggctccgtcctgttccagtgtaacgccttttacctccatgaaggcgggatggccgtcttctgaaaaagcgaggtcaaatcgtgaatcgtgataagtgatttcccttttaatattcgttaccgcggaagcgagaccgccgccggccagccattcggccgccgcctggttcggcgcctgggaatccatattgatcaggagccgtttgtgttcaaatccggcgttatctttataaacgccgataacggagtaagccgtttttcgcccctgtaaggcagcgtccggatgaaactccagtaaaagggaggcgccgggtaaaagaaattctctgagccgtcccgtgtttttcacatggcagaccgtttccctgccgtctatcagtacatgggcaataaaacggttgggtctttttataaatgttccggttacgatattattatattgcatgatgatttctaccattgcctttcctgatttaagctgtaaatcgtaattattatacagcagggggtggcggaaggcaagattcagtggagatttaactgaggttgggaggacgcgtccggaacggaccatgtccggtgtggtgagggggctggctgagtcttccgtccccgtgggaagttggccgtggaggggaatccggccggaatgaattgctgcggggaccgtttgcactctttggagtgcgcagcagtgctaagctcgtaaaggacctcgctaagcaccggcggactcccatgtcccctccgcaattgattccgcctacttccccggggcagattttcgccagggacggaagactcaggcggagatttttccggcaccggacatggtccgttccgggcgctgattgtctccaacctcaggggggacgggaaccttgtcgctgccactacatacttccgatagataatagtctgtgcagtacggttattcttcgatctaaatggagatttaactgaggtttgaggacgcgtccggaacggaccatgtccggtgtggtgagggggctggctgagtcttccgtccccgtgggaagttggttgtggagggggaatctggccggaatgaattgctgcggggaccgtttgcactctttggagtgcgcagcagtgctaagctcgtgagggacctcgccaagcaccggcggactcccatgtcccctccgcaattgattccgcctacttccccagtccagattttcaccggggacggaagattcaggcgtaggttttcgcacaccggacatggtccgttccgggcgctgattgtctctaaccttaaatggggaggaccctgtcgcggccactacgtgtttccggcaggctgatatcaaatcctccacaatttttataatagacccatcgaaggcatatcgtatttcccgctcacggaagctcttagtggccgcgacaaggtcagcccccgcacttaacgcgtgagacaatcagcggccgcaggccagcggacggggccgatacacttggcggagtctttcgtcccggcgaaaacctgaccttggggcggaggggaagataaagtctgcggatgccgttgaaatccatcgctgattagcgaggtcccttacgagcttagcagcgcgatgcatttcacagagcgggagcgtgctccgcagactttatcttcgcccgcagtcccaactcacaacaatcttccctcgggacgaaagactcataaaacaatcccaccactccgtccgctggccgtaccggcggcgtcctcacctgcttaactaaatctctatttttcttgcactaatatataaagtatggtaaaatttttaaccaggaatcatcgataatcaggacaaaaactacggataatcaatcatttgataaaagagaggatggagaatcatggcaatctattacagcagtacccgcggcggtgaaaaaaatgtaacggcatcacaggcaattctgaaagggcttgcagaagatggaggccttttcatgccggatacaattcctgtatttgaccgctctttcagtgagctggcaaagatgagttatcaggaagtggcttatgaagtaatgaaattattcctgtcggattttacggaagaggagctgaaggactgtatcgcacgcgcttacgacagtaaattcgacacggaggagattgcacctctcgtaaaagcagacggggcatattacctggagctgtttcacggcaatacgattgcgtttaaggatatggcactatccatcctcccgaggttcatgactgcggctgccagaaaaaataagattgataacacgattgttattcttaccgccacatctggtgatacgggaaaagcagctatggctggttttgccgatgtggaagggacaaaaattattgtattttacccgaaggacggagtcagccgcgtacaggaacttcagatgctgacacagaagggggataatacaagcgttgtgggaattgacggaaactttgacgatgcccagaacggtgtaaagaagatttttaatgataaagagttcgaaaaagaactggcagctaaggggtaccagctttcttccgccaattcgatcaatatcggacgccttgttccgcagattgtgtattatgtctatgcctatgtgaagcttctcgaaaacggtgaaattgaggatggcgaaaaaatcaatattacagttccgaccggtaatttcggtaatattctggccgcttattttgcaaagcagatgggacttccggttggcaggctgatatgtgcgtcaaatgataataaagttttatatgatttcttccggaccggtatctatgacagaaagagagaatttatcctgacttcctctccgtccatggatattctgatttccagcaatcttgagaggctgatttatctttctaccggctgcgatgccgcaaagaccagggaactgatggaagaactgaccagggacgggaaatatacggttaccgacgatatgagggagagaatggcggatttttccggcggttacgcaacacaggaggagaacgccgctgaaatcaaacgcctttttgacgataccggctatatgattgacactcataccggcgtcgcatcctgcgtatatagaaaatatgtgaaagaaacaaatgatacggcgaaaacggtgattgcatccacagccagcccgtacaaattttcaagaagcgtaatggaagcaatatacggaagcgaagaaggaaaagatgaattcgaactgattgacgagatggagaaagcttccggagttgccgtgcccgctgccatcgaggagattaggaacgctgaaatccgccacaatatacagtgcactccggatacaatggagagtacggtagctgacattctgaaataaaagggataaaataatatgccaattttttaacagtcttcccaaatcgaaaaatatggtatataataaaagaatgtaagtgagaaaagcgacaaggaggttcgtaatatgttagttaatgcaaaggacatgcttcagaaagcaagagatggcaagtacgcagttggacagtttaacatcaacaacctggaatggacaaaggctattctgctgaccgctcaggaactgaattcaccggttattctcggtgtttctgagggtgcgggcaagtatatggccggatttaaaactgttgcagatatggtgaatgcaatgattgaagaactgaaaattacagttccggtagcaacccatttagaccacggctcttacgaaggatgctataaatgtattgaagccggattttcttccatcatgtttgacggttcccactatccgatcgaggagaatgtagaaaagacaaaagagctggtaaaggtctgtgctgaaaagggattatccctggaggcagaggttggctccattggcggagaagaagacggtgttgtcggaatgggggaatgtgcagatcccgacgagtgcaaagcaattgcggaccttggcgtagacatgcttgcagccggtatcggcaatatccatggcaaatatccggcaaactggcctggcctcagctttgagacactggcagccgttaaagagaagaccggcgatatgccgttagttcttcatggcggtactggaattccggaggatatgattaaaaaagcgatttctctcggcgttgccaagattaacgtgaacacagagtgccagcttgcctttgcagaagcaacacgtaaatatattgaggcaggcaaggatctggaaggcaagggatttgacccgcgtaaacttctggctccgggtacggaagcaattaaggagacagtcaagacaaagatggagctgtttggttccgttggcaaagcctgattggaataataaccggattataaatgaaggcggtgacctgtgcgcggagcgtgcaggttatcgtttttgatggcagtgaaaagtttacagatcaattttatcgtctggtaagggagaatagaatgagtgacgcaattaacgtggctgaaatttttggaaaaaatgtatttaatgatacggcaatgaaagagcgccttccgaaaagtgtttataagaagctaaaacaaactatcgaggacggagcggaactggatccgtccattgcagacgtagtggcccatgcaatgaaggactgggcaattgagagaggggctacccattattcccactggtttcagccgctgaccggcgttaccgctgagaaacacgacgcctttatctccgtacccgatgcggcaggccgggttatcatggagttttccggaaaagaattgattaagggcgaacccgacgcttcctctttcccgtccggaggcctgagatccacgttcgaggccaggggatatacgacctgggactgtacttcaccggcttttctgagagaagatacctggggagtgacgctttacataccgaccgctttttgttcttacagaggtgaagctctggacaaaaaaacacctcttttgcgctcaatgcaggcaattaatgagcagtctctgagaattatccgcctgtttggaaataccacatccaagagggtgattccctatgtgggaccggaacaggaatattttctgattgataaagaaaaatatttgcagagaaaagatctgatttacgcgaacaggactctgtttggcgccatgcctccgaaaggccaggagatggacgaccattatttcggaagtatccgtccccgtgtcggcgcttttatgaaagaagtcaatgaagaaatgtggcgtctgggagtctgtgccaagacgcagcacaatgaagcggctccggctcagcatgagctggctcctgtctatacacaggtcaatgtggcggttgaccacaaccagatggtgatggaggcactgaaacggattgccggacatcatggcctgacctgtctgcttcatgaaaaaccgtttgcgggaatcaatggttccggtaaacataataactggtcgctgaccacggatgatggaatcaatctgatgaatcccggggaaacaccgcatgagaatatccagttccttctggttctggcctgcattatgaaagcggtggatattcacgccgatctgctgagagaatcaacggcggttcccggcaatgatcaccgtctgggagcagcggaagctccgccggctatcatttccattttcctgggtgagcagttggaagacgtaatagaccagctttgcagcaccggttccgcagcccattcgattcagggaggagttctcaaaacaggcgtgacgacactgcccgattttgcaaaggacgccacagaccggaacagaacttcaccattcgcttttacagggaataagtttgagttccgtatggtgggctcttcggattccgtatcctcaccgaatgtggtgctgaatacgattgtggccgaagcgttcaagcaggcggcggatcagcttgaaaaagcagaagatttcgatatggccgtccatgatatgattaaagagcttttcgcaaagcacagaagaattatattcagtggaaacggctattcggatgaatgggtggaagaagctgagaggagaggcctgccgaatctgaaatccggcattgattccgtttctgccctgattacggaaaaagcggtgcatctttttgaaaaattcagtgtttatacgaaggcggagctggagtccagagctgagatcgaatatgaatcttatgccaagacaatcaatattgaggcaaagacgatgattgatatggcagggaaacagattgttccggccgttgttgcgtacacgacgcagctggcaaaatcgctttccgcagtcagagatgcatgtccggaggcggatgtcagcgtacagaaagagctgattcttgaaacctcggatctgctgtcagaagtaaaagtagcgcttgccgctcttgaagagaaagccgggattgcagccggcatttcaaacagcaaggagcgggcgtattactgtctggagaatgtgactactgcgatgaaggctcttagaattccggttgataagctggaaatgattgttgacaaagagctttggccgttcccaagctatggagatttgatttttgaagtgtaggcgtaaggattaatacttagttttacagtatataaatcgttacttttcacacggtaatgtcccgcgtgttattttttacagcatagccgtcttttggcaaggatgtgaaaagtaactataaatgaaccgcccccaatcagttggatttttaagcctgacttattgggggcggtttagatcattgaaccagtggattaccgtccgggaccggtggtgaggcctggctgtaatcctccgctgctgctgccggagccggaggaactgcctggggcaaacgaactgccgctgcctgaagaatggttattgctgcccggagcagaagaaccgcccggatttgtgcccggattgttattattgctattattattattgcccgaagttcccggagcagttacgctgccattcgaacttccgggggcattcccaccgccggttgaagtgccggcgttagttacatggccacctgtagggccgccggaagagctgccgttgccggacggcgaactgctgttgcccgatggcgagctgccgttacccgatggtgagctgccgttgccggatggtgaactgccgttgcccgatgggaagctgttgttgccggatggtgagctgctgttgcctgatggtgattgggaagtattattcgtttggccgttttgggaaccggaggatgaattcttcaaagaattcggatcaaagtaactgtcggcgattccgctcatattatttgtttcattctggcagacaccattattgtcaaaagtataatttacattatcaatgacacgggaaacattttccgtcatcttcccgctttcgggatcgaggtaatagaacttgccggaaaggttcagccatcctgtctgcatatgtccgttctggttaaaatagaaccaggaaccgtctatttttctccatcctcttgtcattcgtccggaattggtactcatgtaatacttgctgccattgctgtcactgagccatccggtcagcatcttgccgtcgtgaagataatagtattcaccgtcaatctgctgccatccggacagcattcttccgttctgatccagataataccaggttttatcaatttcctgccaaccggtcctcatttttccgttgctgccgaaatagtaccagtttctgtcaatctgctgccatccggtatacatcttgccatcatctccaagaagataacgggaaccttcaatgtcggtccagccgcgtatcagttcaccggtcggattgaagtaataccagctgttatccatctgataccatccggtagccatggaaccgtcgctctttaggtagtagtaagtgctgtccccgactttcagccattcggtaaccatcgttccgtcgttattcagatagtaccatttgttattgtcctgtatccatccggtagccattacgccctctgaattaaaataataccatttggatgtggaaggatctttgcgccatccggtgatcatcttgccggtattgtcgttcaagtagtaatatttgtcatcgatatggagccagcctttatgctgtgtgccgtcatccttcatgtaataccagccgttgccgtcgttaatccagcctgtttgctttttgtagtcggaatagtaataccagttgttgttaatctgcctccattgtttggcaggtatcacggctgagaagtccttataggcaaaattgatgtctacgttaccggtaatcccggctacagttccctgattagtagcctgccacatggaagctttgttataggtatgcttagtctcatatcgcgcgacccatacatcatagggaaccttgctcatatctattttatttgtcagccagtaatcattggcgtagagcataggataatagcctgcttcttttatttttttgcagaaagcattaataatgtcacttaactgagcaggggtcaaagtgctcataacggacgcctcaacatcaaatactaccggatatgaaataggataatctttgattaaatcaagaataaaatctgcttcctgaaccgccatgtcagttgtagtggcataagaatatatataagctcccaccttaaggccggctgcagcggctgcatccgcatttgtcttaaaataaggatctacggcattgtcatacctggttccaagcataacaaactggatatcgtcgcctgcgacggctttccagtcaatagcctgcttccagtgtgaaacgtcgatacctctggcgacaactccggcaatggatgtgccgtcgctgcctatatagacgccgttatttttagtccaggaaacggcggccagactctcggcggcggggcccaggctcatcaggccgaccagacaggcaagccccagagcctggatacgtttcttgtgtatcataatactcctcctcctgtgtaaaacatacagtgtttgctcactgtatccgtagtaaatacttaatatgattatttaaacttctaaaacttgcgcggtataatgcccgctatgcggtcattataccatgttcctcagggaacatggagtctccgacggaaaacagcgccggatttctgcggtgaacgcagaaaccgtttatgcgcggtataatgcccgctatggggtcattataccatgctcatcagggaacatggagtctccgacggaaaacagcgccggatttctgcggtgaacgcagaaaccgtttatgcgcggtataatgcccgctatgcggtcattataccatattccttagggaatatggagtctccgacggaaaacagcgccggatttctgcggtgaacgcagaaaccgtttatgcgcggtataatgcccgctatgcggtcattataccatatttatacagtgaagttataaataatttattacaattgattcggggaggcttaatccgggaaaagccgggctattctcttgtaatagtgctttgcgtagtgatacatgataattgtatattctccgaattcttctccttccgtacttttgaatacggcccacagacaccacaaaaaccctcccagcgccgcgtaagcataagttgcaattctttcttcaggagtgggaattcgttccagatagacttccagcagccgatccagctcttctgcatcgtaatatgaataaatgctgcacatggaaatatcaatcagcggatcatgcatagccgaatattcccagtctatcagccgcacggttccgtcgggaagaaagagaaagttatccgccacggagtctatatgtgacagacagcatggcctgtttagacgttctacccgatccagcagatgattcatccatccccttacttccgtgtaatcctcaaacagaaggagttcatgatgctgacagagcttttcataaaaattgatccgttcacgcaggttaaaatgatgttccaccgttaattccgactgatgcagcttgcgcagaagggccatgcaggatgcgatgtcatcccagttttttgcatcggcatttctggaaccttcataatatttggcaattttatatccgttatcaccatcgaagtaaatgatatgctctgtgatatctaaaggctcgacagcgtgatatgaggcttcctcttccttacggtttataagcagctctgtgccggggccgggaatacggcagatataatgttcattattaacctcgaacaggaaggatttattagtcatgccggccttgaggcagcggatattgcggattgcggattcctttacgtggaagacctgtgaaaccaggcgcatcgcttcgttgtctgaatgattccggtattttggatcgaacagtcgtaattcttccagattttcaaactcgtagacctgatgctcgggctggcagtttacataaaaatcaagtttgtctatatagttcagcagaacgtgttcccaatagcattgctccgttcccggacggtgataatcggattccagtaaaggaaagaaggtttcggtaaaatcctttgacaggaaagccgggccatataatgtccaggaatcatgtccgccgatggtgatggatgaaattttgccttttttgttggccgtaacacaccattcggatgtatcgccttccatataaacggaagaataccaggagccgcattcataagtatggaacatattgttgcgaatccagttgtctgagaccagaagatacatatttttaccgtaaaaaagctctctgccctgatatacggtagcaagcgtgcttttacaggtgtactccgggttataaaatagctttacattatatttatcgatgagatattcaaatttttccttcaaataacccacaatcagcgtgatgttggtaataccggcctcatgaagctgacggatttgcctctcaatcatcctttcaccaaaaacttcaagaagtcctttgggtgtctcgaaggagagcgggacaaaacgtgaaccgaatccggccgccgtgataacagcgccatcaacacggtactgctccagatattccattcctttttccgttaaactgtatttaccatattcagaatgattctgaatcaaaccgtctttcaggcattcacctactagcttatttacacttccaagagatatcccaagaattgaagacagctctctttgggtaacatctgaatcttcataaatactcctgcatattaatccgtatcgatccatgcataaacctccacttttataattagtatattaaattgttgaaattaaacaggatattgtgtatattcatgatttcgacatttttttgcagtgttcaaaaaagtgacttgaatcatgagatatgaacattatagcatgaaattcttaattgtaaacctcaattcttaggattgtattaatataaaaacaataattggttaataacgactttttgtaacaattccgtaaggaaatgcacagagaaaagttatggtaatttgggattagttatattataatgtgaatgtatcggagacagggtcaacttcccagaaaatgaagcagtagtatgaagtgcaaaaatttcactttgtaacaaaaagttggaaaatttgtaaaaaaactattgataattttccttatccgaagtataatgacctcgtaatgcaattaggaatttcgaaaatatttcaaaaagaaaaaaaaggagagtgcattaattatgagaaagcagactaaattagttgcagttttatctgcagcagctttactcgctatgggtgcttccatgacatctttcgccgctggttgggaaaaagatgacgctggaatctggcactattatgatagtgatgacgaaatggtaaccggtgagtggaagaaagacggtggaaagtggttctaccttgatgatgacggcgaaatgcagacagattcttgggttgacgatgagtactatgttggtgatgacggcgctatgctgatcaatacctggaagaagaccattacagatgatgatatggacgatccagaggaagatggcgagagctggtattactttggaagtaaaggtaagaaaactacttccggttctaaaaaagttaatggcaagacatactactttgacgaggacggcaaaatgcagtctggctggtatgcagatgacaaaaatgtttactatttaggcgatgaagatgacggagctagaaaatctggctggttatggttagaggcaccagatgcagatgacgatgatgaaaaagatgcagctgacgcagtaggacataacggtgaagacagcaacgatccttgtgatgaagaaggatggtactatttcggttctgacggtaagatgtacaaagatgctaagcagaagaaagtaaacggtaaatattactacttcaatgcacacggtcagatgctgtatgagtggatcaatggagtaaagacaaccatgggttccaatgctcagcttgatacagatgatgaaacagctcagaagaatgcatctcctagtgaagtgcgttatatgaaccaggtagaagaaggctggagagctgacggttggtatcagatcgacggtgctgacatccttggtgctggagacgatacagactggtactacttcaaggacggtaaagctaagagagctgagaagaaagatgatggtactagcttaatggatggtacttcaccagtttacagagcaaaaattaaaatcaatggtaaatacttctgctttaatgaaatcggtcagatgcagacaggtttacagccaatcggcagcaagagcggtatggtttcaggattatactactttgatgagaatggctacatgaagactggtaaagtttctaacgtagaagaagagaatgattccttcacatattacttcgaaacaaagaacagcaagaatggtcagggtatcacaggcgagaagtctggttatctgtactggaatggtaagagacttgaagctgatgacgattacaagatttaccagaccgataaagatacttactatcttgtaaataacaagggtaaacttcagaaatctacaagcaagacatacgaagtagagaaccttgatggcaaagaaatgaagttcgaatttaagagtaactacacaattaagtctgctaaagacgaagagggtaatacagttaatctgaccgatttatcagctgaattacctaagatcgagctgttcgatagtgtaatcactcttaagaaagttgcaaatgatgattttgcacttgacgttaagcttgcggactaataagtttggttagaatgagaatataaaatgaatataggagcgtcgcataatgacatgaaatcatttagattttgtatcaggagcgatgctccttttttaggttctttgtcaatagttggggcgggattttaacaaatcccaccccaactattgacaaagagcctttattacaacgaaaagaatgttggaagtgtgcttttcagcacaccccaacattcagtatagaaccaatttttaatattaccggatatctaaagcattgttcttcacttcgaatatctcatcatacagctcaattgttggtccctcagcagcagctacttctgctaatccagcagcttctgtttttactgtatcaattttatatccagtaaatgcaaacgtaacatcctcagcaccagtattttctacatcatacttcttgcttgcagatttctgaatcttgcccttattgtttacaagatagaaattgttctcaacttcatacaccttgtagtcgtcatcagcttccagtctcttaccattccagtacaggtatccatctttttcaccagttacacccttaccatttccgccatttttggtctggaaatagaatgtgtaatcatcatcttcgcactctacggatgaaactttaccagtcttctggtaaccattagcatcaaagtaatagaatgcaccctgagcaggaatgtactgtaagccagtttgcatctgaccaatttcattgaagcagaagtatttaccttccactttaattcttgctctgaatacaggatcattatcatctgttacaatgccatttgcaaatgcaagctgatccgtcgtcatattagccttcttagcttcaccattcttaaaatagtaccagtcagtatcattattggcacccgtatcttcagcaccgtcaatctcataccaaccgtcagctctccagccctcttctactacattagtataaatcatatcaccagcatttgtattagaaggagttgcactaccatctaactgtgcattggaacctacagatatctttccgccgttaatccactcatataacatctgaccatgctcattgaagaagtaatattttccatttactttcttctttgcagcatctttatacatttttccgttggaaccgaaatagtaccagccttcttcatcacagatatcgttatcatctgcatggccgtttacgtcaacatcgtcttcatctggagcttcgagccataaccagcctgattttctggcaccatcatcttcatcacctaagtaataaacatctgtaccatcctgataccaaccatctctcattttaccatcttcatcaaagaaatagtttttaccattgatttttttatcttcagttgtcttcttacccttgcttccgaagtagtaccaagcttctccgtcatcttccggatcatccatatcttcgtctgctaaagttttcttccactgattaaccagcatagcgccgtcttcaccaacatagtactcatcgtcaacccaagaatctgtcagcatttcgccgtcatcatcaaggtagaaccactttccaccgtctttcttccactcaccggttaccatttcgtcatcactatcataatagtgccagattccagcgtcatctttttcccaaccagcggcgaaagatgtcatggaagcacccatagcgagtaaagctgctgcagataaaactgcaactaatttagtctgctttctcataattaatgcactctcctttttttctttttgaaatatttttcgaaattcctaattgcattacgaggtcattatacttcggataaggaaaattatggtgaagagtaaatgggccggaaattacaaagctccaatgacataattcaggaaaaaatgggaatcataataggaaaaatagttacagttcaactttcggccaaactgcagcaaatgatcacagaaacgaaaaaacgccgaaaatacctcgcggaatacatcatggctgaactgttacgaaaaaaataacgatattggaggcacccatgaaaaaacgtatattacttttatctgcagtcatcatttccgccattgcattcaccgcatgcagtaaaaaagatacagccgataactatgttacagagcaaaacgatattatgaataaaatgcaggaagagatggacaaagtacaggacacaggaaacgctactcttgattttctgtacggtatgattcctcatcatgaatcggctgttgaaatgtctaaaagctatttaaaatatgcaaaagaaaaaaaggatcctgcatttaaagagatggcagaagaaataattaaaacacaggaagaggaaatagaagaaatgaaggaaatggcaaaagccatcgaaactgataaagagctggattatgaggacgagcagtcatatttgaaagaatatcattctatgatgaaagaccatgacatgtcacataatatggttacgagtgacgtggatacggcatttgcggaaggaatgatggtgcatcatcagatggcagtagacatggcggagtcaattttaaagtataccaataatgaagaggttattgaacttgcaaaaaacattgttgagactcagaatgaagaaatcgctgaaatgcagtcatttttagatgaacatgcagataataaaaatcatagccattaatatattgtttgtagcagttcagacagcatgaactgttactattgtttattgaatagacagatccctgacaccggatgtttctggagttactatacacagccgctatttcgcgaagcgtgttactgttctcagaaccgtatttttcagcggggctgtgaatagtgacttgccggaatctgcctttttccggcaaaatttactgaattttgccgggggcgtttattattttatgaagaaaaacaaagcagccttaataaaaaattaaaccttgaatcaggccgaataagtccctgaaggttgatttacccatcaacagatgctatactgtaaaaagcctgtagatatgggcttctatgaagatataaggagatttgacacatggcgaaagctgcaccgaagaaggacccgaatgcgctggcggaggtggccggtagtgtttatgcaggaattatggcggtatttacatttgttgttttagctgtatttccgctgtattatcataattattatttcgacattttaaaggcgaaatacaaattttactggatatcagttgttgtgatggcggtaatctgcctgattgttgccattgtatttctgtttgtggacaggatggagtatgaaggagtcaatacaaagcggtttttcagccatttccggccggagaatcttaaaaagcagccggcagcttataaatttctaatcctgtttatcattttggcgtcgctttcgacaatactgtctgattacaaatttgaatcattttggggaaatgaagggcgtttcagcggcctgtttcttatctgcctgtatgcgttaagcgtctttatgattggcaaatttgggaaaatcaaaaaatggcatttagatctttttcttctggcaggagtcctcgcgtgcctgttcggtatcaccgactatttcaggatggatgtccttagctggaaagaaggagtcaagtccacgcagttagattcatttacatccacacttggcaatattaatacttatacggcttacgtggctctggtaatgggagtttcatgcggcttctttgtcacggagaagaatgtgctccggaatatttggtattaccttgtattgctgatcagttttttcgctattatcacgggacagagtgataatgcctatctcgcattgggagcattatttgcattattccccttgtactttttgcaacgagaaaaggggtgatacgttatgcggtagtgatagcatcgtttatgtcggtaatcaaggtgattgatgagatcaataagaagatggccgagaaggtaattggactcagcggcatctttaatatgctggcggaacataaatatctggaagttattgttattgcattatggctgctggttgctgtattatatataggcgaccgtgttatgatgaagggaaaagaagataaaatagggaaatggctccgcatcagctggctttgcctgattgcagccggtgctgcggctgtaattgcagtgctgtatgatgccaatttcggccctaatcctgaaaagtattcgtccgtatcccaatatttgatatttaatgacagctggggtaccaaccgcggttattgctggcggattggatgggagtcttatatgagattgccgctgattcataaattatttggatttggccccgatacctttggcattcttacctggccgttccgtcaggagtcactggatatctatggtgtgttctttgaaagcgcacataatgaatacttccagtatcttgtgacaatgggaccgtttgctacgattgcatatattctcttcctcatatcaagctgtgcaagaatgatgaggtttgtgaagaagcagccatggatcctcgctccgcttggcgcaacggtatgctatggagcgcaggcgtttgtcaatatcaacctgccgatagcaacaccggttatgtgggcgcttttagcagtcggcctggcgatgtgcagagatgtgccggaaaagcttcagccggaaacgctttaaaattcgatatccaaaagagaacaagaataattagaaaagttgcaggaatgataaaatgtttgaaaagatgatgcctcgagataaaaaattcagaatggtggttctgcttctggtcgacatatgcgtaatccagttcagcagtttcatgggactgtggatgcgatttgatatgcggcttcagtccataccggaaaattacagaatggcggcggtcaaatatgcgataccgtacacgcttattacgcttgtgattttctatgtattccgcatgtattcctcgatgtggagcgtagccggagtcagggaagcgtgccacattgtgttcgcctgtgtgttgacaagcctctgccagatagcgggcatgacaatgctccagcttaatgtacccagaagttattttgccatcagttttattatactgacaggctgtgaggggcttgtaaggctgtcctaccgtatttaccgctccctgtttaagcggtacggcgaggtgagcgaaagcaggattctgatcgtgggggccggaacttccggatcgattatcctgaaggagatagagaccagccagtttgcccatggaagagtcgcctgctttgtggatgacgataagaataagattggcaaatttctcaacggagttccgattgcgggaaacagatatgatattccgcagctagttgaaaagtacaaggttgataaaatatatgtggcggcaccgtccgctccggcaaaggaaatcaaaaagattctggaaatctgccgtgaaacaaattgccagttgaaaattcttccgggaattttccagctcctcaacggtgacgtcagtgtgtcaaagcttcgggaagtgcagatagaggatcttctgggccgtgacccgattcgcgtcaatctggacgagataatgggatatgtcagcaacaaggtgattctcgtcacaggcggaggcggttccatcggaagcgagctttgccgccagattgcgagccataacccaaaacagcttattattgtagacatatacgagaataatgcctatgatatccagcaggagctgagaaggacttatccggagctggatttagtggtactgatcggttcggtccgcaatacgcacagaatgaacagtatttttgagcaatacaggccgcagattgtctatcatgcggcggctcacaagcatgtcccgctgatggaggacagcccgaacgaggccgtaaagaataatgtatttggtacatataagacagcgaaagcagccagcagatacggtgtggagcgttttgtgctgatttccaccgataaggcggtgaatccgaccaatattatgggagcgtccaagcgtatgtgtgagatggtcatacagatgcttaataaggagtcaaaaacagattttgtcgcagtcaggtttggcaatgttctgggaagcaacggctccgtaattcccctgtttaaaaaacagatagcggaaggcgggcctgtaacggttacacacccggatataatccgttactttatgacgattccggaggctgtgtctctggtgctccaggctggctcctatgcaaagggcggggaaatatttgtcctggatatgggagaacctgtcaaaatactggatttggccaaaaacctgatacgtttgtccggttatgtaccaaatgaagatatcatgattgagtttacaggcctgaggcctggaaagaagctctatgaggagcttctgatggacgaggaaggccttctcgatacgcctaataaacagattcatataggaaggccgattgactttgatgaagaactgtttaagaaacagctggatgagctttatgaagaagccaacggcgatgaaatagatatcaaagcagcagtgcagaagattgtacctacgtatatccggaaggaaggctagtactccatccggccggaaaccatagtatcggcactgcctgtttcgccgtctgctgcgttggcgtcagcgtatcataaatttcagagttcagaataaggagccggtcatggctccttatttttgtacttagagcaagcctttgctatgatagtcgtatccgtaaatggataagaacttgcaaaggagaagaggattatgacacaagaggaaatgaaacacatcgacccaccaggaaatcacactatctcacacctgtgcgaagcgtggaagctctccatgaggtatcaggtcaaaccaagtacgtttgcctgttatgcaacgatcatccagaaacacatcagaccgtctatcggaactgtggagatggaggaaatgaataacgagattctaagcgaatttattctggaccgtcaaagcaggggcctgtcggctaacacaatgcgcctgatactttttcttttaaagagtatcatacgcgcgggggaaagaagaggaatctgtccggcagaacctctggatttctttcttcccaaggacagaggatatgaaatgaagcttttgagccaggacaacagaagaaagctgcttaactggctggccggatgcagaacaaattttgaactggggctgcttttgtcgctcagcactggaatcagagtgggagaactgtgcggcgtgaaatgggaagacgtggacctggaggagggagtcctgcatatcaggcgcaccgtttcacgtatccggaatacggatcaaaagaacacggcagccaagaccgttctatatataggctcacctaaaaccggaacatcccagagggaaattcctcttcccgattttatgattccgcggctgaaggaaaagaaacgggaagcgggctgttaccttttgaccggcaggaccggctgcatggagcccagaggcgtccagaggcgctttaagaaccttttaaggaagctcaggctgccggacgtaaatatacatgccctgcgccattccttcgcctcacagtggatagaaaacggttttgacagcaagtcactttctgagatactgggccattcttccgtcaaaatcacaatggatatctacgttcacagcaatatgagccagaagaaagtatacatggatcagatgactgccgtttgatttttacagcggggaatctaaggcataaggaaatcttaaagttttttacagccaatcccaattgcgcatttcaaccgtttatgctaagataaataaagcatgtacaataggaggagttttgtccgatggaaccgaacaataattatgaacaggaaattgatttgaaggatttgatgtttgccgttttgcgcaaatggcgtccgattatagtaattgccgttgtattcgccgttttactgggtgcattaaagacagtaaagggaatcagacagctgggagatgaggagtacgttaagaagaaccaggatacctatgtgatgaacctggatcagtataactctacgaaggggcgcctggaaaaagagattgaaaacctgcagcagaatattgaaagccagcaggaatataaagatcattcgattcttatgaatatcaatccatatgacgaatatgtggagacggccactttttacatatcgacagattatgctattatgccggggatgatgtatcagaacccgaatacggctaccagcattctgaaggcttatatgtctattgcacagaacggagagatgtacaattacgtactgggcaagatgaataataagataggaatccgctatctgaaagagctggtgaagatcgtgcctgattatgataataatatgcttgatattacggtaatcggtgacacgagaaagacggccagcgatataatggggtatattaaggacagcatagcatcctccaaagacagtattacggaagcgataggggagcatgagaataacctggtggacgagtcacagtttgtcaccgttgatttagagcttgataaaacacagacagagttttccgccaatatggatcagctggatatcagcctgaagcaaaaaacgaaggaattgtccgagctggcggagccgaagaacaatcttttgagtaagggaagcgttttaaagagtgcagtcaagtacgcagtccttggcggtgttcttggcgcgtttatagctgtattcttcctctgtgttgcattccttatgagtgataagcttgtgaatgagaaagaactgaaacgcagatacggcattatggttcttggtgttttccgccggaacgataagaaacgtgccttcggctttgttgacaaatggctggataagatggaaggcgtatcaggcagagagatggaagacagcagaacattcgaagtggtggctgcaaatgccctgaactatatggagcaggatagggcagcggatgtaatcctcgtcggaacggtggagactgagaagctggagcaggtacgcgccggactcgcctctatgctgggcgccgcagcgctttcggtaggcggaaatcttggaaaagatgcttcggctattaagaaagcggcagcttgtgatgcggtcattcttgtggaacagcggggcggttccctgtttggcggaatcgagcaggagctggatcttgtcaggagtctcggcaaaaaagtaatcggctgtattgttttatagtgaatgacactgcagtacagtccggtgctgataatgtgaaaatatacaatattattgtgttgtattgtcgaaatttgcggtggataaggcctttatttttcaacagatttatattataaatataagtgttgatttacatagcatgaaggaggaagagggttatggaggaggctaagcggattgctttactggagaaggagaatttcgaattgaaagaagaagtcgataccttgttcaatacggtggttcagttgaaagaaagtatgaatcttcttgttagccgttacatcgtaaatgagaaaagcagataaaaaacagggcaggtaatcatattatcagttaagagataatgattcctgccctgtttttgaaccgacttaattctgtttatatgtactctgttaggtgattaaaatcctgaagcaaatgcacgaatgttattcattggcattcccgtggagcttgcgtgttaaatcccaaatcatatcatgcatccaatcaattgttttctcaagttctgcattcttctggtgaaggtccaggttttcatattccagttcttcgttcctggccttcagctttgctatggcagagcggctgttggatgttttgctctgttcggtaagccgctgtacaaccgaagtctgtggggttacgttgcctgctatctgatcagaaatgagctggtcgcgcatattataatccatatccataaagttctggtaggacataggaaagacagtcataggtgtcttacatacggggcaaatggcattcttcgaaacctgatagaagccataacggccgcatttggaacaatagtaaacagtcaattcacgcataattttatctcccgtcatctgtgatagtttgtaacccgatataaatacggtaatatccactccatatctacattacaacatttggtcataaaataccatacttactatagaaaacgtataaaaaagacaaatgttacagcttaaaatgtacttttaaaaaaacataatgaacaattcaccgaatttgttcactttattatatgatccacaaaactgaaaaagaacctggaaatgccatcaatagtacaaagttaaatttgacaagaaaaaataccgcggttccgtcaagacggcctacggtatttatgaacggatgatattaatatattactggatgattcctgaactgtcaactgtccagacagtatcatttgtatctttaatgtctttaaaaccttttcctaactccggttttgcagaggatgtggaggtggaggatgctttctggatgttgccgcttgtgttaatcaggtaacgtttttcgcctacggtaaccgcctcgtaacggagttccgggtcagctttctgaagcaggccgtttaaataaacctggttgtcacgttccccatggtatccctgtcctttcagagaaccctttgcatggaagtaccatgtctggttttcttcaagatcctcatcataaatagtctgttttcctgtctgcataatgccgttctcattgaagtaataagttgcttctttgccggcatcatcagtcagaacctgaatacctgtctgcatctcgcccttgttgttaaaacagtatttgttagaattgatggtgaagagttccagattcttttctgcgtggaacgcttctccgtttttaaagtagaaggtaaattcgttatcgctctcattgattcccggagccccttcaattgtgaaccagccggatgctctttttccgtcattctcttcatcatagtagcggaagtcttttaaggaaagggaagaatccgcctcgctttcggtggcagcagccgcagaagagatgaatcctgcctcggctacattaacccagcctgtctgcattttgccatcgataaatgtatagtaattgccgtttattttacgatccatctgatccataatcatttttccgttttcgtcaaaatagcaccagatgccctcatcgtccgtatcgtttgtcatttcttctaaaagtacccagcctgtttttctggctccgtcgctttcgtttccaagatagtaggtaaatccgtcgatttcaacgagtcctgtcagcatctggccgtcttcgtcgaagtagtaggtttttccgcctattgtcatccatttggaagtaacgattttgccgtccttgccaaagtaattccagttagcgccgcccggagaatcagggctgtcgtattcttcgtcattgtccacggatacccactggttttttaccatgcggcctgtggaattcacgtaatactcatcgattctctgacttacggcaagatcgccgttttcatccaggtaaaaccattcactgtcttttttcttccaggtgtttgtttctttgtagccgtcttcatcatagaagtaccagctgccgtcttcttccacccaccccttggatgctgcgtaagaagtgtagattcctgaatagtttgtcatcattggtgcagccgcagtcatgattgccgcagcggataatacagccataaattttgtttgcttgcgcatttttaatctctcctttttcgttcaatgtttctggccgaaaatccatcgttgcattacgttgtgattatatcctatccggcgccgaaaaagatagtgcaggttgctggtaaggatggaaggaaataggagcggtgacaattcgaaggcgcggcgctgccgtttccctgcgaagaagcggatgaaaagccccggagaggaaaagagataaaaaatacagccctgtcctctgcacggtacaggggttggggctgtatttccgccaaaacggtaaaattatttatgatatcttgaatcggtgatgaactcaacattgagagttcctgcaagacggtccagcgtttctgtgacatattggttgattccctgtgatttttcgcgggcaatccggtaatccatatcggcgttaaaatagttgtccccatgataagtgtaaccgtcaaaaccggcgcatgcggcatgacttactctggttttgacaaggacatttaacagcatcacgaaggagttgtcaatgatttccgcatttgggtcaatcagggagctgtaattcagtgtgtagtcaaagcgatccttaacattggtgacattggaggtcgcaataacctttactttccggtctgtacggtctttcagctccagaaggcggcttcccagctggacatagcgccgggaattacttaagaaagcatagtcgatagcaatatcatccggaatatagtttacggagatgattacaggatttgtcttttctatataggatagcacgcgatctttctgaagttccatatttttgccgggtcccaggagcaggagagccttaccagccagggcttttgttaattctgccagttccgtctcatcattgcactctgtgctttggtaagtacggtaaagctgttcaatgtaatctttgtcatagagcagttttttctccggctcaatgctgtccagaattccgttcaatgccttcaaagacaatgtctgcttatccatcaggaatttaacatagcttggatgacagttgtttgaggcggagatatagaagaaaagattataaccccaggggcttttcctgaaaaacggcataatattgatatcaatggcttccagcatctgtgcggtattgaaattcctgccgcagctcgtattcatatacatggaaatcagttccagcgggaggttgcccgcactttttcccatgccgtacaaggatgcatcaatcagaacacggcggtcggccgtctcgcggagtacttctatactgtttgaatacgccagctggaaattgttatgggaatgatagccgataccgatttcccggttcaggttgtgattaaacagttcaaagtagtgcatcagattttcctgatgaagtaaaccgtaagtgtctacaatggataacgcatagggattcagttcatttacaagctcgattaaatccaaaatttctctgtcagagtagctggtgatcgaaaccgcctggacatagacctgatagccgagctgttttacctcgcggcagtaggcaatggcttctttcattacgtgttttttaaatatgacgcgtattccgtcgataaaggattcggcgcagggggcaagattttcgatacggcaggttccgtagtcgatcatggccacaatcatggcattgcctttgtccagcctgccgaaaatgtcgtcggcgctttttgtatcaggcataatggttctgtttttgtcaaatggccgccggtcatccagaaaaccgatttccagcacatccacgccggaactgatcaggcgttcaaaaatattgatgatattgccatagccaaactcccagtcattgacaaatccaccgtcgcgcagtgtacagtcaagtaattttatttccttcataatgactcctttcagatttccggcgccaggcccagaaacataccaatgtcagccggtttaccggcgataaaaacaggctcaaactctttccagccatcagggtcggagggaccgaagccgtaggtgactgcaataaaatcagttccggagcattttgcgccgctgccgtcggaggcggtgtcgccaatcaaaactgcttccgcaggggacaggtttaagcccttcaggcatttatctaaaacatcggttttctgcatcttgctggcaaaatcgctgccgcagatgcagtcgcagtaattgctgatttgatagtgctccaaaagtgtgagggcataatcctctcttttcagagtggcgacaccgatcagatacccctctcttttaagacttctaagaagtccgatcaggccaacgtagggggttgctttcaaaagatcgtaatccttataccggttgcggaaaatttcggtggcccggttggcctcttcctcgtcaataccatagacttttataagcgagtgcttgattggcgggccgatgaaagtcttcatcatgtcctcacgcgggggttcatatcccatagttttagtggtatacagcacactttccaaaacgccttttgctgtgtcaagcagagtgccgtccagatcaaatataatgccgcggtagcggcggtgggatttttcctgtctgccggcaggattgtttgttggttcaggtatcatttgcggctcctttatttctcgttgcgtttccggtcttcaaactgctctctgatccgttccagatcttttggtgtgtcaacggacagcgttgaaccggagatgtcttcaaatataacgtttttaccctgctctatgaaacgcagcaggtcgaattcctctatcttttccaggcgggatatgggagaagcggcaaaaaagtcgagcgcttctttggtgtagaccccgatacttacgaattttttatagctgtaatcaagactgcctttgggataaggaacaggactgcgggaagcatacagacattttcctgcctggctgcatacgatttttatattggctgagtcgaatacttcgggggcggaagtaatggacgccatggcgttcacgacgaaaggcctgtccgattccggcagtccggaggtctccgacatggctttgacagcctgatgaaccacctggcggatatcgccgggggatatcatcggctcatcggcccccatcatgacataaaaatcagcttccacctgcccggcagcttcccagatcctggaagtcggattcggatgccaggttccggttatcagacagggaatattatattcggcgcatgctttctgaactgcctcatggtctgctgcaacgcagactgcgtccaatatgccgctttcagccgccgcattgtatacatgccagattagtggcctgttatccagaagagcaaggacttttccgggaaaacgggtcgaattaaaccgtgcggggattatcccgacaattttcatagtgctgcctccttttgacggaaatttcgtcaagcatatatgcaattatagaaaagttcggagaaaaaaacaataggttttggagatttagttaagcaggtgaggacgccgccggtacggccagcggacggggtggtggggtgtgtatatgagtctttcgtcctgggggtttggcatcgctggatggagaaggagatactgtggttttgttttcgcagggcggagccggagagaatgatatccggctggactgcttcttcgagggatagctctaagccagaggaagacaaagccccccggggttacggacaaattcgctccgaactccgaatgagttcgaagctcaagttgtcccggattttgcccttgtagggctaaaatccgcccggcgcgctttgtctccctctgcctaagagctatcatctctcgggcgaacgtccttccggatatcattctctccttctccgccggaagatgtcggcagtatctccttctcccggaaggttttcgccggaacgaaagactccgccgggtgtatcggccccgtccgctggcctgcggccgctgagtgtctcacgcgttaagtgcggggggcggaccttgtcgaggccactcagtgctaccgtgtacgggaaatacgatatgccttcattgcgcctttataaaaggcgctagatttggtatctgcctgcggaaacacgtagtggccgcgacagggccctccccatttaaggttggagacaatcagcgcccggaacggaccatgtccggtgtcgaaaacctccgcctgagtgttccgtccccggtgaaaaactgccccggggaagtaggcggaatcaattgcggaggggacatgggagtccgccggtgcttagcgaggtccctcacgagcttagcattccgatgcgcactccaaagagtgcaaacggtccccgcagcaattcattccggccggattcccccctaacgacaacctccaaccggggacggaagactcagacagccccccctcaccacaccggacctggtccgttccggacgcgtcctcccaacctcagttaaatctccaatttgttttgtacagcaggatatgtaagaaaatcttatataggcagacagaagcgagtgtggtataatatgaagacttaatgaggtattttacgaataaaaataaaactttatagagaagatttaaaagaggagaagaaattattatgcaaaaaaaagtttccaactatattgcggaaaaacttttagagagtgggatcacggatgtatttttaatcaccggcggaggtgcgatgcatctggatgatgctctggggcatcaggagggacttcactgcatgtataatcaccatgaacaggcctgtgccatggcggcggagagttatgccagaattaataataagattgccgctgtctgcgttaccaccgggccagggggaattaacgctatgacaggcgtggccggaggttacatggattcgattccgatgtttgtgatctcgggccaggtccggtatgatacgacggcaagaagcaccggactccatttgagggccatgggcgatcaggaatatgatattaccaaatcagtggcgaatatgacaaaatattgtgagatggtcatcgatccgatgagaatccgcttctgtatggagaaagccctctatctggcatacagcggccggccgggtccggtatggctggatattcctctgaatgtacaggcggctgtagtggagacggaggatttaatcggctttgacgcagaatcatataaagcaggcggaacaggctgggcggctccttctgcttcagagattgcggaggatataaagggaaatggagaataccgggaaattcttccggaaccggtgacacatgatacggccagggctattattgaaaaaatccgtacttccaggcgtcctgtcatcaatgcaggcaatggaatccgtatcggaggggcccatgaggtgtttatgcgtgtggtggaaaaactgggaattccggtggcaacgggagcggacagtatagactgcatttatgatgaacatcctctgtatgtaggcaaaggcggaaatgtcggggacagggccggcaattttgcaattcagaacagcgacctgctcttatctctgggcagccgtctgagcttccgccagattggttaccgtttcgacacatgggccagggcggcttatgtaattgtcaacgatatagacgccgaagaattaaagaaaccgacactgcacgtggatatgccggttcacgccgatgtaaaagagcttctcacggtgatggaagaaatattggatgcggaaggaacgccggagggcgctgccccggctgacgaggcgtttcagaaggcccaggctgagtgggtgcagacctgccaggggtggaaacgcgactatccggttgtcctggaacgccatctggaagacggaacagagacggaagccaatgtatatgcctttgccaggctgatgagcgagcgtctgaatgaagggcagattgtcgtggttggcaatggctctgccaatgtagtctgcggccatggcaatatcatgaaaaagggacagcgttttatctcaaactcgggaattgcgtctatgggatatgggctgcctgccgctatcggggcctgtgtggcggatcacagccaggatatagttctcgttacgggcgatggcagcattcagatgaatcttcaggaattgcagacagtgattggcaattacctgccaattaagatttttgttattaacaatggtggttatcactctatccgccagacacagaagaatttctttggtgagcctttagtgggaatcggtgtagacagcggtgatttgacatttccgagcatggaaaagctggcatgggcctatggttttccatacgtcgcaatccataacaatggcgaggttggagaaaaggtggaggagacgctggcaatggacggcccggttatctgtgaggtatttgtgacacttgaacagaattttgaaccgaaatctgcggccaagaagctgccggacggcactctggtatcgccgcctctggaggatttggctcctttcctgccggatgaggagatggaacaaattatgttcatcccgaggatcaagaattaattgaacaaacacataaatgcgaaccatagaaacgagctataaaacaaaccataaaatcataaaacaaaaggaagaggcatgaatatagtagtaacgggagcgaccagctttgtcggaacagggcggtaaaagagctgctggacagaggacactgcgtttttgctgttctcagagagaactccgcaaaggcggacaaactcttgcaaaatggaaaaataccggaaaatcttacaattttggaagaagatttaggaaatttgggtaacctggttaacaggatggaagaacactgtgatgtgtttctccatatgggatggcgcggagccggaaacagttccagaaaagacgcagggatccaggagagaagcgtgcaggacgccctgaatgcggtgaggacggcaaaggctctcggctgccgccgctttctctttaccggctcccaggcggaatacggcgttcataatacgctgatggatgaaaccataacctgccgtcctgcctctccttatggggaagcaaaattaaaggtccggcgggaggctgaaaagctgtgcagggaactctctctggactatggacatgcctgcattttcagcacatatgggccgggagatcatccctggtccctgatttccacttgtattgatacctttttgcatggcggccatatggagctttcagactgtacgcagatgtggaattttctttatattgaagatgccgggcgggcgctggccggcctggcggaatatgaaggcagtctgctggagcatggctgtgtctacaatctggcgggaccgatggaagagacccgctccctccggggatttgtagaagaaatttacaggctttgcgagaacagggggagcttcgaatacggcctgaggcagccgaatgcggaaggggtggtaaatcttattcctgatatcggaaagatgaaaagggtgacaggatggactccggaaatccattttgagcagggaatccttaatattttaagaaaattgtaggttgtcaaatacagcaaaggcgtttagaataaagggagcgttcaaaacaggaaaaagttttatattaaacgacaaaaaattgccgtttaataaccctccggggaggtgcacgatttttgcaaggaagcttctgcgtttacgcggaaaaaatcggcacaggatacgccataaggaaaagatgtatgacgtttcctataaaacaggaaaatagaaaagagagatattttcaaatgaagaaaatcagcattttaataccctgttacaacgaagaagaaaatgtcggccctatcagcgaagagattgtaaaaaccatggaacgggatctgccgggctatgattatgagctggtatttattgataatgattcatctgataatacgcggccgattcttcgcaggctctgcagtgaaaaccgccgcatcaaggctatcttcaatgcaaagaatttcggccagtttaattccccctattatggaatgctccaggtaaccggagactgcgtgatcagtatggtagcggattttcaggatccggtggaactgattccacagtatgtcagagagtgggagaacggctataaaattgtaatcggaattaaaaaaggcagcaaagagaatccggtcatgtactggcttagaagctgttattataaaatgataaagaggctgtccgatgttgagcagatagaacattttaccggctccggactctatgacagggactttatcgagatactccgcggactggacgatccgaccccgttcttacgtggcattgtggcggaactgggatataagcgaaaagagattccttatatccagccggagagaagagccgggaagacgcacaataacttttataaattatacgatgccgccatgctgagcattacctcttacacgaaagtgggactgcgcctggcgacaattttcggcagtatctgtgcagccgtcagcatggtggtagcatttgtttatcttattatgaaattattatactggtatgattttccggcaggaatggccccggttctcatcggcatgtgcttcctggggtctgtacaaatttttttcatcggtcttgtaggagagtatattctgtctattaattcaagagtgatgaagcggccgcttgtgattgaggaagagaggctgaactttgaggagaatcatcatccggagagtaatccacaggacagaggcaaaaccccgtgtaatgcggacgtggaagccggccgggaacagcaggtgcagggatgaaatttaatgtagatgtagtgaggatacgtgagaattcaatacagctcaacggctgggccattggaaagacgccggatgcgaagattgcgtttgatgtggaggacgaggcccgccattctctggaacacaagtatgtcccgaccagaagggacgatgtgagccagatttattttggcagagtgatggatcgggaatttggatttgatattcagttcccttacgtccggggaaaagactattatctggtaatccgtggtgaaaacaggcggatccgggttaaatataatgaggatttaataaagaaaagaagcagcgtggcccataaacggatacagaagatccgggatctgatgaatatggagacggttcacgtctgtcttgatttctggaaagagaatgggttaaaggcccttctgctcaaatcaaaacacaagcttcaggggattgacaatgattacgactatggcgagtggtattccctgacaaagccttcaaatgaggaactggagcggcagaggcaggagcggtttgactacatgccgaaattttccattgtcataccggtttacaagacgccggaacgctatctgaaagagatgcttgattcaattctggcacagacctacgcaaaatgggaggtctgcgttgcggacggaagtccgagaggcgagagtgtggagcgtgtactccggcgctatgcggaaaaagacaggcgctttaaatatgtgattctgggagaaaataaggggatttccggtaatacgaatgccgcaatcgatatggcggacggggattttatcgtcctggcggaccatgacgatatgatgacaccggatgctttatatgaatgtgcaaagaagattaatgaaaatccggaatgcgatgttctctattcagatgaagataagctggacatggacgggggggcgctcttcgatccccatttcaaaccagactttaatattgatctgctccgcagcgtcaattatatctgccatctgtttgtggtgagccatgagcttacggcagaggtcggcggattttgccatgaatttgacggagcgcaggattatgactttatcttccgctgtacggaacgggcagcaaaaatctgccatatccccaaggttttatatcattggcgctgccatcaggattccacggccagcaatcccgaaagcaagctgtatgcgtttgaggcaggagccagggcgattatggcccattatgacagagtagggattgaggcggaaaaagtggaaaagggagtcgattacggaatataccattcggtataccggattaaggacaatccccttgtttccgttattattccaaataaggatcaccatatggatctggacacctgtatccggggcatagaggaacgcgcaacctataagaacctggaattcatcgtggtggaaaataacagcacgaagaaagaaacctttgattattatgacaggatacagaaggaattttccaatgtacgcgttgtgaactgggagcgggagtttaattatgccgctatcaataattacggcgtgacctttgcaaagggaaaatatctgctgtttttaaataacgacacggagctgattgcgccgaacttcatcgaggaactgctgggcttatgccagcgcgatgatgtggggattgccggtgcaaaacttctttatcaggatgatacgatccagcacgcaggagttgtcgtgggattcggcggaatcgcagggcacacgtttatcggcctgcaccgtgcggagaacagctatttccaccgtgcgatgagtactcaggactacagtgccgtgacggctgcctgtatgatgagtaaaaaggctctttttgaagaggtgggcggtttttcggaagaactggccgtcgcttttaatgatatcgattattgcatgaaggtgcaaaaagccggaaaattagttgtatataatccatatgcccttctgtatcattatgaatccaagtccaggggactggaggacactccggaaaaggtggagcgttttaacagggagattaagattttttcggaaaaatggccggagattttaaagaacggcgatccgtattacaatccaaacctgactctcagaaagtcgaattttgccctgagggatttaaaaaaggaaaagataggggaaccatacaaactggatatttaaagagctgctgttcacggaacgcggtttgccggctgtgaacagtggttttaaaggaaacgagaatggaattaactacaactgttattattcccaattacaacggaatgaagtttatggacgaatgtatccgggcgctgaatgcccagacctataagaacttcaggattctggcagtagataacggctcctccgacggaagtgcggagtggctcagggagcatcagattgatacgatttttctggataaaaatacaggattttcaggagcggtcaacattggcatccgggcatcggaaacaccttatgtgcttttgctgaacaatgataccagggtggacgaatattttgttgcggagatggtgagagccattgaacgctctgaaaagattttctccgtcagcagcaaaatgatacagatgtatcatccggagctgatggatgatgccggggatatgtattcacttctcggctgggccttccagcgcggcgtgggccaggatatcaggcgctacaaaaaagcgtgcagggtgttttcttcctgtgcgggcgccgctatctacaggagggatatatttgagcaaattggatatttcgacgagatgcactttgcttatctggaggatattgatgttgggtaccgggccaggatagagggatatgacaatgtatactgtccggcggctgtcgtgtatcatgtgggcagcggaaccagcggctccaaatataattcttttaaagttaaactggctgcacggaataatgtttacctgaactataaaaatatgccgttattgcagctttttattaatgcggttccgatcgcggcaggcacagttttaaagtatctgtttttcagaaaactggggtatgaaaaagactatctggaaggcctgaaagaaggtctgaagacggcgcacacctgtaaaaaggtgaagtacaggccggaaaacttaatgcattatctcacaattgagatggagctgattgccggcacttttatctatatgtatgagtttgccgtcagaagacgaaagaaaaaaacaagcgaaagttgaggtgtcttatgaattacgaggacgatgagctggagcgcatgagggcccgcagagagcagagacggaatgcgtcgcagagcggctccgggcgcggcacggatacgcgccggaacgcagatgggggcggtgacgctttccgttccgggtacagcggaccaaagggaagcaccagagggagttcaagcaggggaggttctgcaagaggaactgccggaaaagggcgcagggagcagaaagtaaataacaggagaagaaggccggacaagaaaaagcggattatgatcatcgccgcggagatcctgattcttctggtgattgttgtgggcgccgccggctggtatgtatatgagagaacctttggctcatttcagaaaattgagtttaacgaagaagaggttaaaaacccggagcttaccgatgcccagatagaaggaatgaagggctatttgacaattgcctgtttcggtgtggattccagaaacgtcggcgggaagatgaatgtcggcaagggtacgaactcagacgttaacatgatttgcagcgtcaacctggaaacaggggaaatccgtctcgtttccgtattcagagacacttatctgaatgtaaatgataaaaactcttataataagattaactatgcttatgcgcagggcggaccggagcaggccgttaaggcgctgaataagaatctgggactcaatatcacccagtatgcgacatttaactggaaggcggtggcggatgccatcaaccttttgggaggcatcgatattaccatcagcgaaaacgaattttcctggattaatgcgtatatcaccgagacggttgaggagacgggaatttactccacgcatctgaaaaaagccggtgatgtacatttagacggtgtacaggcggttgcttacggacgtctgagactgggagatacggactatgcccgtacggaacgccagcgtattgttctgaacaaggcatttgaaaaagcaaaatcggctgactgggttacgctgaactgtattcttgagacagtagttccacaagtggcgacaaaccttgacctgccggatttgattccgcttgcaaggaatatcaagaattaccatatgggtgatacatacggtttcccggctgccagaggagagcttgatattggcaaaataggagactgtgtggtgccgcagacgcttgaatacaacgtgaaagaactccataaattccttttcgatgcgcaggattatcaggtgccatctaatgttaagcagtacagtgagcatatagccagtgtatccggcatgtataaagaaggaaaactgattagtcatgttcctgtcgatcagggtattaatgcccgcaactatattaacaggcaggttaagaaacaggcggataaagtggcggcgacggcgaagcagacggaagaggagacggaagagtcctcgacggatgagacagaggagtcctcgacggatgaaagccagacggcagacagcagcgaatccggtacaggagacggctgggatgactgggacggctgggacgactggggtgactgggacgatgaagaaaattacggcccgggaagtaacggtccgggaagcggaccaggatcctccacgagaccgagcaggccgggaagcaattccgacaggacaacggaagccgacgaaaataatgcgacgggaccggctgcgaccggaccaggcaattctaacgtggccaaaccgggcgagaccaagccaaacaacagcagcaaaccgacatcggagagtacgtcggcatcaggaaacgtttccccgccagggaataactctccgtcagggaataactctccgtcagggaataactctccgtcaggaaataactctccatcaggaacaaattctccttctggcggaaattccccattgggaaataatacggctcccagccagacgcagggtgcgaacccggcaggcgcaggcggcccttcaggcccgggagcttaagaaaaacggcggtgaaaagttcggaatgaaaccttttcaccgccttgatgaataacagcaggagctgggtgagatactatgataaaagataatcagaaacgtctgaataattttcatgtggtgctggatgcaattgtaatattactttcctatgctctggcctggtatattcagattggaaatccatggtcaggcgtcacggctcataataagcaggctatggcggcagtttacctgattgcagctgtcattattgtgccgctttacctgatcctctatgcttttttccacctgtatacgccaaagcgtgttcaggggcgcagactggaactggcgaatattttaaaggccaatacaattggtttactgagtattgctctggttctgtttgcgtgcagaaagaatgattatttcggtaacttttccggccagatgctggtgcttttctttgtaatcaatgtaattgccgaattttcggtcaggagcattctgcgcagggcgctccgttccatgcgttccaaagggtacaaccagaaacatcttcttttggttggttacagccgggcggcggaaggttttatcgatcgtgttaatgccaatccggaatggggatataaggtcaggggaattcttgacgaccatgaagagtggggaaaagaatataagaatatccgtgtcatcgggaaaacaacggacctggatgaaattctggcgctcaatacccttgacgaaatagccattacgctgagtattaacgagtatggcgatttggaacggattgtggctgtctgtgagaaatcgggcgtccatacaaagtttattcccgattaccataattttataccgacaaagccgtttatggaggatcttcagggactccctgtaatccatatccggcatgtcccgctgaccagcctcatgaacgcaacgatgaaacggggcgtggacatattcggcgcggttgtggcccttgtactgttttccccgtttatgctgcttaccgtaatcggtatcaaggtgacttcgccggggccggttatattcagccaggagcgggtcgggcttcacaacaagccatttaagatgtataaattccgctcgatggcagttcagcctccgacgaaggaaaagagccagtggacaacgccgggagatcccagagttacctcgattggccgttttatccggaaaacgagtatagacgagatgccgcagctgtttaatgtgctgaagggggatatgagcctggtaggtcccagaccggaacgcccctttttcgtcgagaagttcaaagaggaaattccgcgttatatgatcaaacatcaggttaggccgggaatgacgggctgggcccaggtaaacggatacaggggagatacctcgattaccagaagaatagaacacgatctttattacatcgaaaactggacgctgggttttgattttaaaattttatttctgacattctttaaaggatttatcaataagaatgcgtattaatatttacagcttagccgtctagccaggccgggtagtgactgccggcgttactatataacggcgcgaaacggtaattatacaagatgaggtcaactgcatgggatatgatgatgaggcagagcgctcccgaaacagaaggagccgggccagacagcctgtcaaacggatgggagacagagaaattgaacagagaagataccgggagccagggcattcacagcccgggcttaacctgatcacagacacattcagagaggatggcggccgcagacagaattatgacaggcctggaccggagaaagagagcaggaggcagaagcgcggaagaaaagaaccgcagcaggagaagcagaaaagcagacgcagaggagagccggagaaggacagtggaatttacagtacccctgccagaaaaaaggcaaaaagaagaaaaagaaagattgtaattattctttttgaagtactgattcttttaagcgttatcatttttgcagcatattcttacgtggacaagcggttgagcggtatgtcaaggctcgactggaatccggatgagattaaaaacatagaaatttccgaggagaaacaggagcagatgaagggctattggacaatcgccgtttttggtgtggacagccggaattcatcagtgggtaaagggaacaactccgatgtcaacatggtatgcaatattaacatggacaccggtgagattaagctggtttctgtttaccgtgacacatacctgaatatcagcgataagaacttttataataaaattaatgccgcctatctgcagggcgggccggagcaggcagtgaaggcgctgaataagaacctggatctggatattgacgattacgccaccttcaactggaaggcggtagccgatgccatcaatattctgggcggtattgatgtggaaataagcaaagcagagctttattatatcaatgcatttatcacggagacggtcaaggcaacgggagtctactccgtccatttaaagaaaacgggaatgaatcatttagacggcgtccaggcagtggcatacggaagacttcgtctgatggatacggattatgcccgtacggaacgccaaaggaaggttatctcactggcgtttgagaagttcaagaaggccgactgggcaacgatcaataatgtgatacagacgatataccctcaggtatccaccagcgtggagctaagtgatttgatatcaatcggaagaacgcttccgaaattccatctgagtgattcgaccggttttccaagcgcgagaggcgaggcgaagatgggaaataagggagactgcgttatcccacagacacttgagaagaatgtgatagagcttcacaggttcctgtttggagatgaaaattatataccgacggatacggtaaagacgatcagcagaaagattatttccgacacaggccttgcgaaggaagcgaaaccggccggggatgttggtacgggcggaggttcggttccaaagactacagaggcggaggaaacgaaagaaacaaaggagaacggcaccggtcactccggggaatcgatggaaaatgagcatggcagtttgggaacaggtgaatcccagtctgcggaatatccgggtgaaactgtgcagcaggagacagattcccagggaaatatgatattcccgaccagagagagcgagagcggatccggcaggccgtcggaggaagagacgggaggcagtattgtaagaccgggtacgacggagagcagccgtccgggaaccgagggtacaaacggatataatccgggcaccggttccgggggaaacggcggaaataacaacagtaatgtcccgggcggcacaaatgcgccggggaacaataataatatgccgggcggcggtaattccccgggaggaaataacagcggcacaccgggaggaaataacagcagcacatcgggaggaaataacagcggtacaccaggaggaaataacagcagccggccgggaggcagtaacaataatgcgcctggggggagcagcaataatactccgggcggttccggctcccagaaccaggcaccgggcagcaacacggatacgggcgtaattcttcctccgggtaccggaaccggagggaacagcggaaacagcaatgctcccggaaccggaaatgtagagttctccggccctatgggctattaaaacgcacggcagaacgatgacctgcatgctacgcgcacaggtcattgtcttcaataacaaaaaagcagcaccggtgcagatcgggttctctgacagaatcccgccgcaccggcgctgttttttatttctcttcgcatacctggaatatgtagaatttcaggtaataggacgattcgtcaccggaccagagaatcggatgatcggcagcctgtgttctgtactctacctgacggaggcgtttgtgaacgctgccggctgcttcacggatggtcctggtaaaaagctccggagtcataaagtgagagcaggaacaggtggcaagaaagccgccgtccttaacaagtttcagccctctcatgttgatttcccgatatccctttaccgcattcttcacagaatttctggattttgtaaatgcgggcggatccagaatgacaacgtcgaatttttccccgttatgttccaatgagggaagaagttcaaatacatcggcacagaggaatgaggtggtgcctgatacgccgtttaactcagcattctgtcttgcctgagtgattccgagttccgaggcatctacgccaagcacctcggacgcgccggaaacagcggcgtttaaggcaaaagagccggtgtgggtaaagcagtcgagaacgcgtttccctttgcagagcttctggatggccagcctgttatatttctggtccaggaaaaatcccgtcttctggccgtcttttacatccacaaggtagcgtactccattctcgacgatttccacgcgggtatcaaagggctctccaataaatcccttataccgttccattccctcctgcaggcggaccttggcgtcactgcgttcatagactccgcggatggatatggcgtcctccagcagaacctttttcaatttttccagaatgaccggtttccatcggtcgataccaagagccagtgattccacaaccagaatatcggaaaatttatcaatcacaataccgggaagaaaatctgcttcgccgaagataagtctgcagctcgaagtatccacggtggcttttctgtattcccaggcatttctgacacgcatctcaataaaattttcatcaatcaccgcatcttttttacgggacatcatacgtactgtaagtttagaccttgtattaatgaaaccgcttcccaggacataaccgtcaaagtccagtacttttaccatatcaccgttctcaaactccccttcaatccgagcgatttcattgtcataaatccacatacctcccgctttcagggaacgggcctcccctttctttatatgtacaattgccgtttctttcatattgaatatccttctttctttttctgctttacggttctttattctcatatcatgcggccgtataaggccgaccggactgcaactcaagtatacaggagcaggatccgggtggcaagcagaaaataaagatttaattaagcaggtgaggacgccgccggtacggccagcggacggggtggtggggtgtgtatatgagtctttcgtcccgggggtttggcatcgctggatggagaaggagatactgtggttttgttttcgcagggcggagccggagagaatgatatccggctggactgcttcttcgagggatagctctaagacagaggaaggcaaagcccccggggttacggacaaattcgctccgaactccgaatgagttcgaagctcaagttgtcccggattttgcccttgtagggctaaaatccgcccggcgcactttgtctccctctgcctaagagctatcatctctcgggcgaacgtccttccggatatcattctctccttctccgccggaagatgtcggcagtatctccttctcccggaaggttttcgccggaacgaaagactccgccaagtgtatcggccccgtccgttggcctgcggccgctgaatgtctcacgcgttaagtgcagggcggaccttgtcgcggccactaagagcttccgtgaacgggaaatacgatatgctttcaatgcacctttattaaggaattgtggaagatttgatatcggcctgccggaaacacgtagtggtcgcgacagggtcctccccatttaaggttagagacaatcagcggccggagcggaccatgtccggtgccgcgaaaacttccgcctgagtcttccgtccctgcgataacctgaaccggggaagtaggcggaatcaattgcggaggggacatgggagtccgccggtgcttggcgaggtccctcacgagcttagcactgctgcgcactccaaagagtgcaaacggtccccgcagcaattcattccggccggattccccctccacaaccaacttcccacggggacggaagactcagccatccccctcaccgcaccggacatggtccgttccggacgcgtcctccaaacctcagttaaatctctcatcaacagcgctctgactgaactgatactgaaaatttaaaaaaacatagtttggtgatactttcttcacagttccatcacaaattactgatagactatgccatgtaaagatataaatgatataaattatgaatgaaaaaatagagaaaaagaaaggagcaataactatgtataatgagaatgactacaataaatatcagggcggcggctccaggcaggaccagaatacggacagcgacctggactatacggaaggatcttattcggacagcacatcctcacggcagacggacagcagatacagcggctatcatgattccaggtataccggcaatgccgaaggcagggagcggagtgggggaacatatcaggacaggaaaccggacagaagctatattccgcaggagccggggcgaaacgggaaaaagggcggttacatggctaaaagggcagcgggaatcgcggcggcgggaattatttttggctgtgtagccggaggaacgatggccggtgttaatattctggcggacaaactggttccggagacggtccagagcagtgaagcgcctgcgctttcttcacaggcggttacggagcagccgactacggcagcggcagtacccgtttcaaccgggaatgacgtttcggcaattgttgacaaagcaatgccttccgtagttgcaatcaataataaaatggtttatacacaggaagactggtttttcgggaaacagtcctatgaagtgccgagcagcggctccggtattatagcagggcagaatgattcagaactgcttatcgtgaccaacaaccatgtggttgcagattcggaggagctgtcagtcacatttatcgacaatacaacggtaaaggcagcggtcaagggcacggattcagattcggacctggcggtaattgctgtaaagctttcggatattccggatgagacaaaaggaaagattcagccggcagtactcggcgattcagacacgttgaagcttggtcagggcgtggttgcaatcggtaatgcgcttggtcagggccagtccgttacggtaggttatgtaagcgcgttaaataaggaggttacaatcgacggtgttgacaggactcttctccaggttgatgcggctattaacccaggtaacagcggcggagcgcttctgaacatgcagggcgaggtgatcggcatcaatgcggccaaatacgccgatacggatgtggagggtatcggatatgcgattccgatttcctttgccaaagatatcattgacgacctgatgacgaagaccacgaagattgccgtggatgaagaggaacagggttacctcggaatccagctgcagaatatcgacagcagaatggcgaaggcttacggcatgccggaaggaatctatgtttataagattgtagagggcggagcagcggcaaattccgatttacgcgaacgtgatatcattactaaattcgatggagaaacagtcaggacaggtgatgaacttcaaaagatgctgacatattataagggaggcacgtcggtcacactgacggtgcagagcctggaaaacggctcctatgtggagagacagatacctatcacactcggttataaaaaagacagccagaaacaggaggtacaggaaaactaaatgccgcaccgcggcgaataaacgtcggaggcacagtgtcatggccggcagtacggagttaaccgctgccggccggtactgtgccttttattgatgacggtcacctgttcgcggagcgtgctggttatcgttgaaggcggtaacctgtggcgagcgtgaagattatcgttgccgaaatttttacagaaccataagcagagtgccggccccaatcaggacacagccaagagcggaacgaaccgtaaacggttcatgcaaaattacggcagccatcaccattgtgataataatgctgagcttatcgacagggataaccctggaagcctcgcccatctgcagcgctttataataacaaagccatgaggcgccggttgcaacacccgacaaaatcaaaaatatccagcttttccggctgatttctatcattccgccctgggtattggtcagaaaaaccattccccatgacatgagtaggacaacgattgtacgaattgccgttgccagagtagaattcaccccatcgataccaattttagcaaggatagaagtcaacgccgcaaatacggatgaacctaatgcaaatagaaaccacataatgctctttcctttcagatattcagattatcgttcagccaaatccagcctgattccaatatgattattctatcacatttttaatggtgagaaaatatcctgctgataagtcttttataccgggaaggcctcacgctactgttcacaccccgccaaaaagcggcgcgccgtaaaactcgggattttcctgcaaaatgcgcacgaaaacatctcgcaggcacaaccgtgtgaacagcagcttcctcccttcctcaacaaaactttccaatgacttttctgtataagtattgtatactggaaagcagaacaaagtgaataacggcagatactgccgtcatctaaggagtaaataagatggaagaaaacagagcgaaaaacctggcggcactgactgtcccgctgccggaagatattgaaaaactgaagtggcacggtgattttaccagggcgctgaagattatagagaaccgcctcggaaaagacatccccgggataatgaaggaaaggcttgtattggagcgtgatattatcaggcggcttccgcttcagtatcccttcagccatcaggcggcccttgcctttgcaacggagcggatagaaggtttttcagaggaagaacttgagaacctgattgatgaaaatgcaatagactggctgtatattgagggtgagagaaggattaaggatgattttgtcgacaatcttgtaaagaccaggaaagatatcagagcgcgtattttcgataaatcggctctggcggagggagagctggaaggccgtctgcgtgatcagaccataaagagaatgaaggaaaaaggcggccttgcctattatttccgtatcaggagtacgttgaagattcgggaagaggcatttgaaccgggaaaaacagtacgtgtttatctgccgattcctctggaatatgcacaggtcaggaatttcaggcttcttcacacatcgatggagcctctcaggacagcgccgcctctgtggccgcagaggacggtatgttttgagactgagctgacggaaaacagtgtattttcaattgaatatgaatttgagaatcatacgccttatattgaattagatgagaacagggtaactggcgcggcggatgcagggaaggtattacctgacggcagcaggcttgggaactggcttggggaacagcttccccagatcaggttcacaccgtttctcaaaagcctgacggaagaagtggcgggaagtgaggaaaatccgctttgcagggcaaaacgcatttatgagtacataacttcccatgtgacgtattcctttgtccgttcttatttcacgataacggatattccggaatatgcggcggcaggtcagaaaggggactgcggcatccaggcgctgcttttcataaccatgtgccggatcgcgggcgttccggccagatggcaggcaggactttatgcaaatccgcgcgatatcggctgtcatgactgggcgcagttttatatcgaaccttatggatggctgtatgccgactgttcattcggggcggtgcatacagggacgatgtaaaagagagaagagaattttatttcggcaacctggatccgttccggattccgatgaactcggaattcggctgggagtttacaccgccgatgaagcggcccggcagcgatccatatgataatcagaccggggaagcggagtacggagacagggcgctgatacgcgacgagctggacacggcgcatgagataatagagataagggaaattgaataaaggaaatcaaaatccgtttacagacaggaggaaatagactttggaagacagagataaagataataaaattgatgaagagacaactgtgacatcagaaggcggcgaacagaaaccggacggcgctgcaccgaaatcagacggagatgatgattatgaaaaaatttgttatgtctgccgtcgtccggagagcaaggccggtacaatgattacaatgccgggaggcatgaatttctgccacgattgtatgcagaaggcatttgattcagtcacacagagcggcctggatttcagcaagcttcagaatatgccttatatgaatatgaatctcagtgattttccgaatctggagaatatgaatcttgagattccgaagaaaaataaggtaaaaaagaagaaagagaaagaggaagaaaagaaacagcaggaattcagtatcagggacatccctgcgccgcacgtgataaaatctcgtcttgacgagtatgtaatcggacaggagaaagcgaaaaaagtcatctctgttgcagtctacaaccactataagcgtgttcttttacagaacggcgggcaggatgaaaatcaggaggagaaggtacagattgaaaagtccaatatcctgatgattggaccgaccggaagcggaaaaacatatcttgtcaaaacactggcgcggcttttggacgtgcctctggccatcgcagacgccacttcccttacggaggccggctacataggggacgacatcgagagcgttgtgtcaaaactgctgtcagcggccgacaatgatgtggagaaagcggagcatggaatcatttttatcgatgaaattgataagatagctaaaaagaagaatataacgaaccgtgacgtcagcggagaatccgtacagcaggagctgttaaagctcttggagggcagtcaggtggaggtgcctgtaggctccaaccagaagaacgctctcactccgatgaccacggtagataccaatcatattctgtttatctgcggcggtgcatttcctgatttggaggatattattagagaaagactgacaaaatcaactacaatgggctttatgggagagctgcgcgacaaatatgagtcagatccggatattttgaccaaggtgactacggaggatctccgtacattcggcatgattcctgaattcctgggccgccttccgattgttgttacgctccaggcgctcacaaaagagctgatggttaaggtgctgagggaacccaagaatgcgattttgaagcagtatgtgaagcttttggaactggatgaggttaagcttgtatttgaagacgaagcattggagtggattgcggaggaagccatcaagaaagaaacgggagcgcgtgcgctcagggcgatcatagaggagttcatgcttgacatcatgtatgagataccgaaggattccaatataggctctgttgtcataacaagagcctatctggaaaaaagcggcggccctatgattgaaatgaggggataggaaaacgcgcagttactgccgtatacgtaagaatgagttatagagatccagcattccatatccccattcccggttgggataggtaatgtttgaatttcttcttgcaccgcggatcaatattgattttgcggaggatgtattgagcgtcaggacagtttcattacgcaatgcccaggatagcaggttggctgccgctccggccacatgggcggccgcaatggaggttccggtttccgcacggttatcgggggccacgacgttgaccccgggggcagccagatccggtttgattgtgccgagtcttgtgtagcccctgcttgaatggatgtaaatactgttattgcggtggttataagcggcaaccgtgatggctccggctgtgtttccgggttccgttataatcgtattcggatcgggacgcaggaaaaatgtattctcggatataagaccggccgtggggagccagatattatattctccctgtataaacaattcattatgcactctgattttccagatgccgggagtgggattcttgaagcgcatcatgataagctggctgcccgtcgcgctttctgcaccgctgtagcttaagtagataacggtatcttccaaaaggaaggtgaggcggtgctcctccggagaggtattggggacccgggggatcagttcccccgtgggcgaggtaaaggcgacggaatagagttcggactccctggcccacagctccactgtgaatccggtttcattgcttcctacccgcagctcaacttcctcatactcctcctctgcggcaatgtggccaagataatggtggccaaatccggtttcgttgccccggccactacggttatcaggccgaagctgttgctgaaatgattgagataactcggcagaggcgaagagccgctgtggcttccggtattcgtaccgatacccagcaggatggtaagggcagagagtatttccgggccatcagtagaagatatttaatgcccagcatgatatcattttcctggtaagcatgcgcatcttcagaaaccatataaaaatccctgagatattttttggccggtttcagttttacaaccgccaatttcgattcggggcggcacccgtgaaattggaggccggcacttcattcccagcggcaaccattgccataaaagtgccgtgaccaatcgtatcgacagaggggacgatggaaagcggctccacgctatttaaggcctcattaatctgttcctccgtataggaggttccatagcggatatcctgtacgatatctcccgtctcaattccctggccctcaatagtctgatcccagattccgacaattctagtggaaccatccatatttttaaaaacaggattctggtaatcaatgccggtatctacaatgccaatcagggtgccgctgcctttatagcccaattggggctggtcgaaagttcttaaaatgccggcgctgtccatattggcagaatccagcaaagtatagaggctgggaattgtatcatatccgtcttttcctatagaaagcggctccacttcagagagcggctggtaaacaacaataaattgcggattgacaaaatcataacaaaaatctatgtcctgcagaattgattcaggtgagaatacataatatcggtaaataaaatcggcaattgattcagaagcggaattttcagtacacgccatgcgcaatttccttaaattgtttttattaatatatgccgggcgggagaaaatattataaggaaagctgtcttgggaaactttacgggaatgcaaaaaaatgatacgataggaagaagaagtctaatttatttatgagcaggatgggaggaagattatgcagtttctcggattaatggcaggcctgttcggccttgacatacttttaaaggggaaaatagaggccggcgataaggaagatttccctagggatatggaaggaacctccggtaagataaggctttacagaaatcataatgacggtttctgctttggcctcttaaaaaacaaccaggaactggtgaaaacggttcctctggtttttacgtctgctgtgacgggtgtttttttctggctgcttactagaaaaagccgtctgatcgacaaactgggattttccctggtgacggcaggtgcgctgagcaatctttttgacagggtgaaacgcggttacgtcgtggattatttcagctttcagttcggctggcttaaaaaggtggtattcaatataggcgatatttgtatctttcttggtacttttctgctggctgtttccgaacttttctccggcccggagagcagacccggaagaaagtcggaacacagggcagataaagcggatggagctgtggagcagtaatacctaatcatcaaaattcatcataacggcgccgattgccgtggcgaatgctgcattcggcggtatgataaagtgtacgccgtagagatctttcatttgctcaaacacaccgaataccttgaccgccggaggcaggcaggcgagggagccggtcaggacaatgtccctggccgtatcgttagtcagggcaaagatagccaggacgcctacggtctggtacacgaggttaaagagggcggcggcgacatcacagtcgctggcgtcatttttaacttttccaaagttggcggcggtcagttccgggggcagtgaagcaatatcgccgcagaagatatcactcatcatcagatccacctttctgagatcacctttctcagccatggaggacaggacgaaaatgtcggtttcatgaagaaaatgggaggccagtccggacagggttccgccgccgaccccgcttccccctatatggcggatactgtttttgtccgcccgcacaaaagcggtgccggttccgatgcttacaaccaatgcttcatccagaccggccagagccagtccgccgcgtgcgatggcatccagttccactgctttgacggttgggattgcatagatatcttcctcgataaaggaggcgcccacaccggtgaggacgattttagaaatatcggccagagacagcccgtgttcacgcagaaaacggccgagagcgccgtacaggctggttatctgatccgatgctttgacctgcagtgtgccgaggagctttttttcttcagtaaatcctgctatttttgtcgtggaaccgccgatatcaataccgattgtagctttcataatttttccttccgtgttctctaataatagctttattataaacagaggcgggatttttagcaagctttcctattatttgttgacaggcagtgggaaatattgtagaatcagctttaaaatatgataaaacaggagttgatttttttggattcaagtgacgccatacagttgcttattttagttgttttgcttgcattatctgcatttttctcatcgtcagagacagcccttaccacggtgaacaagatccgtatgaggactctggccgatgccggtgatggcagggccgagtttgtcatgaaagtgatcagcaatccgggcaagatgctgagtgcgattcttattggcaataacatagtaaacctttacgcatcatccctttccacaatgctggctacaaggttgtggggcaacgaggccgtgggttttgcgacgggtgtgctgacattgcttatccttgtattcggtgagattacgccgaagacggtttccacaatatcagcagagagcatcgctcttcgctttgcaaaaattatatatattataatgatagttttgacaccggtgatttacatcgtaaaccatctatctttttttgtcctcaaattgttccgggttgatccgaataagagaggggagtctatcacggaggatgaactgaggaccattgtccaggtcagccatgaagaaggtgtgattgagtcggaagagaagaagatgatcaacaatgtgtttgatttcggtgatgccgtggcaaaggacgtcatggttccccgtattgatatgagctttgtggatgtgaatacaagctatcaggatttggttgacatattccgggaagagaagtacacgagatttccggtatttgaagagacgacggacaatgtgatcggcattatcaatattaaggatatcttcctggcggaaaacagcgaggatttttcagtgaagaattacctgcgccagccgctctacacgtatgagttcaaaaaagtttcggaactgatgattgagatgcgtaaagccatgataaatattgtcattgtcctggacgaatacggagcgacggcgggacttatcacgctggaggacatgctggaggagattgtcggggaaatccgtgatgagtacgatgaagatgaggaagaggcgcttatccagattggccccagggaatatgtggtggaaggctccatgaagctgacagatttgaatgactatctggaactgaatcttcagtcggaggattatgattccatcggcggtctggtaatcggactcctcgatcacctgcctgaggaaggcgaggacgtggtgattgataatgtgcgtctctgcgtcgacagcgtagagaaaaacaggattgataagatacatctctatattctcaatcccatcgaggcggttacggcgaggcgggaggaagaggcggaaaaacagtagaatttaagaaaatactgcatcgtttgaacatgttacagccagacttattgaagtctggctgtttgcatatctttgcgactgtccgcaggaatatgaaaatacgatcagcttatcattccgcctatcgtgccgcttccggcgcacatggcaaagatgagggccagttcattcatattgcttccgatactcttgtggattaaaaaagaaacggccaggagtaccagaaagtaagccgtaccggagaaaaatccccacaaaaaccgctttacttttgctgctttaccagccagaaccccgccgataaaacaggtgacaatgtagataacattgatccccagatttacctgactttcactcaaatgaagctgataaaggccgaatgccagaagcagcagaaagatggcggtgagtatgtaggtgataaaaatggtgcggattattatccgcagactggactttcccataatgactccttgtaaattttcttctgcttcatgtatattcatgagagggccaggatatgcggacagccgtaaatggagatttagttaagcaggtgaggacgccgccggtacggccagcggacggggtggtggggtgtgtatatgagtctttcgtcccggggggttggcatcgctggctggagaaggagatactatggttttgttttcgcagggcggagccggagagaatgatatccggctggactgcttcttcgagggatagctctaagacagaggaaggcaaagcccccggggctacggacaaattcgctccgaactccgaatgagttcgaagctcaagttgtcccggattttgcccttgtagggctaaaatccgcccggcgcgctttgtctccctctgcctaagagctatcatctctcgggcgaacgtccttccggatatcattctctccggctccgccggaagatgtcggcagtatctccttctcccggaaggttttcgccggaacgaaagactccgccgggtgtatcggccccgtccgctggcctgcggccgctgaatgcctcacgcgttaagtgcgggggcggaccttgtcgcggccactaagagcttccgtgtgcgggaaatacgataagccttcaatgcgcctttattaaaaaatagtggaagatttgatatcagccagtcggaaatacgtagtggccgcgacagggtcctccccatttaaggttagagacaatcagcggccggaacggaccatgtccggtgccgcgaaaacctccgcctgagtcttccgtccccggcgaaaatctgccccggggaagtaggcggaatcaattgcggaggggacatgggagtccgccggtgcttggcgaggtccctcacgagcttagcactgttgcgtactccaaagagtgcaaacggtccccgcagcaatccattccggccggattccccctcacgacaacctccacccggggatggaagactcagccagtcccctcaccacaccggacatggtccgttccgaacgcgtcctcccaacctcagttaaatctccataacaaggcttttagcttgcacatgtgagtaacatgtgatataatctgtaagaatttatatcgtaattttaatgaggaggatatagaacgatgaaacacgttaaaacattaaacacaaacacattaaaaaacagcatgaagaagggcggctgcggcgagtgccagacatcctgccagtctgcatgtaagacatcttgtacagtaggaaaccagagctgcgagaatcagaaccgataattttatgaaaacgttgggaagcatgcttttcatcgtcagccaacataagagatttgacaaggaaggcaggcaagacgggcccctgcggtcacttacatgacttgagggatcggtgttgtctgcctacatgtgtctggataaggagaaaatcttgtgattcatcaatatataaataacggtttttatatcgttttagacgttaacagcggttctgtccattcggtggatccgctcctttatgatgcaattaagcttctctcgggcaggcttgccgatatgaaagagcctgcacccgtaccgcgaaagaccgcggaggaagtggcggagctcctgaaggagaaatacagtgcggatgagattcaggaagctttttccgacatacaggaattaattgacagggaggagctttttaccgccgatatttacaaagactacgtgatggattttaaaaagaggcagactgttgtaaaagcgctctgtctgcacattgcccatgactgtaacctggcctgccgttattgttttgcggaagagggggagtaccacggacgcagggcgctgatgagctatgaggtcggtaaaaaagcgctggattttctgatcgcaaattcgggcgcccgaagaaacctggaagtggattttttcggcggagagccgcttatgaactgggaagtggtaaagcagcttgtggaatacggacgttcccaggaagagcttcataataagaagttccgttttacgctgacaaccaacggcgtacttttaaacgacgagattatggaatttagcaacagggagatgagcaacgtagttttaagccttgacggcagacaggacgtcaatgaccggatgcgtccgttccgcaacggcaggggaagctatgacctgatagtgccgaagttccagaaatttgccaaagaacgcggtgacagggattactttgtccgggggacctttacgagaaataacctggactttgcagacgatgtactccattttgccgatcttggatttgaaaagatgtcggtggagcctgtggtggcctctccggaggaaccctatgccatccgggaagaagaccttccgcagatcatggaggagtacgacaggctggctgaggaatatataaagcgccacaaagagggaaggggctttacctttttccattttatgctggacttgaaccaggggccgtgcgttgcgaagcggttatccggctgcggttcaggaaccgaatacctggctgtaacgccatggggagatctctacccctgtcatcagtttgtgggaaatgaagaatttcttctcggcaatgtggacgagggtgtgacaaagacggagatttgtaatgaattcaagctctgtaatgtctacgcaaaggataaatgcagggattgttttgcgagattttactgcagcggcggctgtgcggccaattcttttaatttccatggctctattacagatgcttatgatatcggatgtgaaatgcagaaaaagcggatcgagtgtgcaattatgattaaagctgctctggctgaggaagaataataacaataacactgaaaagtaagcacagatgtaagcatagataaaagcaaaaggagaaaagcgatgaagaacaaaaaaggaaagagcctcatagggctgctgctcctgcttgttgctgtcggtattttcggttatttcggatattcgacaatgggagcaatcaagctgggcctggatctggccggcggagtcagcattacctaccaggcaaaagaggcaaatccgtcttctgaggacatggcggatacgatttataagctgcagcagagggtgcagaattacagcaccgaggcggaagtttaccaggaaggcagcaaccgtatcaatgtagatattccaggcgtttccgatgcgaacgcgatcttgcaggaactgggcaaacccggctcccttgtattccttgattctgagttcaatcaggtcctggacggtaaacaggtgagcagcgccaaggccggcatggacgacagcagcggagtgaaggaatatgtggttgccttgacctttaatgaagaaggtacaaaagcgtttgccgatgcgactaccaaaggggtcggcaagcctatttatattgtatatgacggccagccaatttcggctccgaatgtaaaagaaccgattacaggcggacagtgccgtatcgacggcatgggcagctttgaagaggcggagaacctggctgccacaatccgaatcggctccctttcattggaactggaagagctgcgttctaacgtcgtaggcgcaaagcttggccaggaagcgatttccaccagcctgaaggcaggcgccatcggtttcggcatcgttgttgtatttatgatttttgcatacctgattccgggccttgcagcatctatcgcactctgcctttatgtgggactgattcttgtgctgctggcagcctttgaggtaacattaactctgccgggcgttgcaggtattatcttatccatcggtatggccgtggatgccaacgttattatctttacccgtatcaaagaagaaatcggaatgggcaagacagtgaaatctgcgattaagacaggttttgcaaaggctctgtctgccatcatcgacggaaacgttacaacgctgattgcggcagccgttcttttctggagaggctccggtacggtaaaaggttttgcgtccacactggcgattggtatcatcctttccatgtttacggctctgttcgtaacgaaatttgctctctactgtctgtttgaggcaggtttgcaggatgccaaatactatggcgttaagaaggatacaaaggtaaggccgttcctgagatacagaaagctgtgcttcgcggtttcgggtgttttgattcttgccggatttgcggcgatgggaatgaacagcgcttccggcggctcaattttgaactacagtatggagttcagaggcggtacatcgacaaacgtaacgtttaatgaggatatgtcacttgaccggatatcttcggaggtagtgcctgttgtggagaagataacaggggaagcgggaactcagacacagaaggtagccggaaccaatgaggtaatcattaagaccaggactctgagcgtggacgagagagaagagctggatcaggctctggttgatacctttggcgttgatcaggaaaagatcacggcggacagtatctccggtgcaatcagcaaggagatgaaacaggatgcggtgattgccgtagtgattgctacaatctgtatgctgctttatatctggttccggttcagcaatattacgtttgcggcaagtgcggttctggcgctggtgcatgacgtactcgttgtcgtgacgttctacgccgtatttaaatggtccgtgggttccacgtttatcgcatgtatgctgacgattgtcggttattccatcaatgccaccattgttatattcgaccgtatccgtgagaatatgaagctgaaaaagcatacacagacggtggaggatgttgtgaatttaagtatcagccagacgctgacgagaagtatcaatacctccctgacaacatttatcatggtatttgttctcttcctgatgggagtatcttccatccgcgagtttgcacttcctctgatggtgggtattgtctgcggtacttattcttccgtatgcctgaccggctcaatgtggtaccttttcaatcagaaaaaagaacagaaggcggccggagagcgggcggcaaagacaaagaaagagaaataatatatggagtataagattctttacaaagacggacgcgcgaaacgggcagagatgaaaaccgtccatggaactgtccagacacctgttttcatgaatgtgggaactgtgggggcgataaagggagccgtatctaccgacgatctgaaggaaatcggaacacaggtagagttgtccaacacctaccatctgcacgtgagaaccggtgacaagctgattaagcagtttggcggacttcataaattcatgaactgggacaggccgattctgacggattccggcggttttcaggtattttccctgtcgggacttcgaaagataaaggaagagggcgtttattttaactcccatatcgacggcaggaagatattcatgggtccggaggagagcatgcagatccagtccaatctgggctccacaatcgcaatggcatttgatgaatgtccgtccagcgtggcttcaagggaatacgtccaggcctcggtagacagaaccacaagatggcttgaacgctgccgggaagagatgaaacgcctgaatgctcagccggatacggtgaaccgtgagcagctcctctttggaatcaatcagggagcaatttacgaggatatccgcatcgggcatgcaaagaccatcagcaagatggagctggacggctatgctgtgggcggcctggccgtgggtgaaacccatgaggagatgtaccgtatcctcgatgcggtggttccccatcttccggaggataagcctacgtacctgatgggggtcggaacgcctgccaatattttagaggcggtggaccgcggcgttgatttctttgactgcgtgtatccgaccagaaacggccggcacagccatgtctatacaaaccatggcaagatgaatctgctgaatgcaaaatatgaactggataaaaagccgattgaagagggctgcggctgcccggcatgccgttcctacagcagggcctatataagacatctgtttaaggcaaaagaaatgctcgggatgcgattatgtgtattgcataatttatatttttataataaaatgatggaagagattcgcgacgcaatcgaacatcaccgttatgccgaatataaggctgcaaagcttgccggcatgatggccggagaggaagcaaaataaggacatggtccaaactgcgttccatccgggacaaactaaaaatcaagattacgcggcgaggcggcggatcggtcaaaggaggaaagaacatgggcacagcgggctgggtactatattttgtctttatcataggacttatgtactttattgcgatcagaccacagcagaaggaaaagaaaaaaatgcaggagctgatggcaggtgtcgcagtaggcgacagcgttttaacatccagtggattttacggcgtaatcatcgacatgacagatgatacggttatcgtagaattcggcagcaacaagaactgccgtattcctatgcgcaaggatgcaattgttcaggttgagaaaccggaactgtaattaatatgagtgacgggcaatgaaatgaatcattgccgataataaaaaagccgtctggattaatgaatccgggcggctttttttctggctctttgtcaatagttggggtgggatttgttaaaatcccgccccaattctatgaaaagggccctttttatgtttagttccaggttttactgattttgggcatgccaaataagcctccgcattaccgacctttttatcctatgatgtacagtgaagtatccgggttcggaaccgtttgaaattccggattccgtagctgctccgttttaatacctttatcttgttgttaaatccttctgtgggaccatttgtcagcccgtatttaaaggcattcaggatttcttttcgccaggccctgtaggtcttagcacaggcctcaaattccttgatcccacagctctgtgcattcgcaatccagtcatcaaattccctctgctgctgacgatacgcttccatctggcagatatcatagaaccactctttcatgcggtgtgccagacgcagctcctcgctatagtgaagcattaaatcacaggcctgtttgttctcatccttcagctttttgtagcgggtcagaatgagtttccggctgcgtttataatacttacgcagagaaaccggcatggagcgctgcagccgtttgcgtacattttcaattgcccatgtcacctgccggatgaaatgatatttatccacgatgattgtagcgtttggaaagaaggtttgtgcaagttcggtgtaggggcgccacatatcgcagacgaagaactttaccttcaggcgttctttcctgggaatgttccgccaataatcagccagatggctttgggtccgatccgggagaatgtcgaggatccggcgctttttcggatcaaccagaatgcactgatatttaccggtagaagcattgcctttgaattcgtcaatggaaagcgcttgtggaagctggtcaggcggaggatagcaaatcgtgtccagaaggcggcagaccgtctggacggaaacaccggtaagctctgcgatctgttttaaggaaaaggtctgccggagcagggagacaatgtaaaatgccagcctgcgggtcctgcggtggtagctggggaggaacgaatagggttccgtgaaccgtttgcggcagtatgggcagaggtaacggcgtttgcgaaggagcaggattacttgttttcccagtaagggaatgtcctggacttcttgtaaacggtaatcatgaatccgttttgttttagccccacagcagggacaagtctgttctaccggttgggactggatgaaaattttaatgaaagagtctgcctgaaccacttttttaatagaaacaccttccaagttaaggaaagccttggtataattagggtacatctataaggggtcacctccataacattaaactttggtcgggataatgcgtttaggaggcttcttatagatgtattttattacaacgaaaagaatgttggaagtgtgcttttcagcacaccccaacattcagtatagaaccttttttctctatattgaagttggtgacctgtgcgcggagcgtgttactattcacggccctgctgaaaagcgcagctccgcgaacagtaacacgctccgcgatgcacagaaacggcaaacaacgccgtttcgcgccgtgtaactcgggattttcgtgcaaaatacgcacgaaaacacctcgcggaatatgggccgtgaatagtaaccgtgcatgtcatcttttatgaacgtgttcataaaagggttgacaagaaagataaaaaaatgtatagtatatatgaacatgttcatttaaatgaaaaaggggatgatacggtgcggaaaaaagacgacagcctgagggggcactgattgactatgcccgggaactggcggagaaagaggggcctgaggcagtcaatatacgctctctggccgggaaagccgggattgcgacgggtacggtatataattatttttcatgtaaagacgaaatcctcctggctctcacggaagaatactggagaaagaccttggccgatatgagggcggcagtcacggccccctcattctgcgggcagctggaggaaatttttacttttttacgggagcgtatcgacagctccgccggaatgctgatgcacagcctcgggaatgtcagggagacagggcaggagagaatggaatccatgcaggaggttctggaagccgcaatggtgtatcggatggagcaggatccgggcatacgcagtgatatctgggacgaaacatttacaaagagagattatgcccgttttattatggcgaatatgatgctgctgctcagggagcatccatatgatttccggttttttctggaaatagtcaaacggaccatttattgagacagagaggagtacggctatggcacaggcgattgctgaaacagtttttgacattttatatcttggttttgccctgataacaggactgaccatgctgacaaaaggaaagagccggatcgtaaaaatggcaggatggatgacggcgctgctgggggcaggggattcctttcatctggtaccgcgttcctatgcactttggacaacagggatggaagcaaatgcagccgcattggggattgggaaatttattacgtctgtcacgatgacggttttttatctgattttatattatatctggcgtgagcgttaccagattcgggaacgaaagacacttaccggtgtaatgtggtttttagcatgcctgaggattggactttgtcttctgcctcagaacgagtggctgtcctatcaccagcctctgtcttacgggatactgcgaaacatcccatttgcgataatgggaattatcattatcgtaatctttgccgcagaggccgggaaaaaggcggatccggtgttccggtttatgcctttggcggcgggactttcctttggtttctacctgcccgtcgtattgttcagcggcgcagtaccggccgtgggcatgctgatgattccaaagacactggcttacgtctggatgatttggatggcgagacggctttacaaagaagaaacaataatcaggcatacatagaacggaggagataaaatggaaaaacgttatgcggatgcagccatattctatgcagcggctgccatggtattcggtgtgttttacagggagtttacaaaatttaacggttttaccggaaaaactaatttatctgtcatgcatacacattattttctgttgggaatgtttttctttctcatactgatgctgcttgaaaagaatttccggttttccggcggggagaagattggaataattctgacagtctatcacataggattgaatgtcaccgccctcggttttcttttaaggggtctgacacaggtatggggtaccgaactcagcaggggtatggatgcttccatatcgggcctttccggtgtgggccatattatgctgggaatcagcatgattctgttgttgctgaagatcagaaaaaagacggtcttagaaaaaaagtaacgcgaaagtagagaaaacggcctgtaaatgcagacgggacagcggtttaccgcatctgtccaagctgtatttacaggccgtttcttaatgccgcgctccagacggcacagctatttatcgctcagcagcaggcagacgataccgcagaagattcctgcgaccggataaatgacggctgcggaccggaacatatcaaatgaaaggccgaggaacaggaagagagctgtcgccaggagcatgatgacgccgcacagcttgctcgccaggtgctttttgccgggaacctccggacggttttcctggttatatttgccgatgtcgtatttgtccttctgcatgccaaagaaagtgaaaataccgacggccacggcggtacagagaagaaaaacgcctccgcttatctgctcagaataagggataacggtgtactcaagccagatgttcaggcagagagaaaaaacaatgagactgaccccggaagctatggcaattgcaaaaatacggttgaaattggcatgctgttcttccgtgtagaaattatcgatatcgggatagcgcctgcggtagtactgatggctgatgccggctattatcaggatatatacggcaattcctatcaatacgaacaggataatgcttgtaacggcttcgcttacgattccgtccagcgaggcgatgattgcgaccgaaaaaatgatcagggcaacggcagaggaaaccatgatggaatagcggttcatatggcggttatagcctgtcgaatcttcttttgccgcttctgtcacatcgcctttgatgaggctgtccatggaacatccgaactgctcgcatatctgaagcagtttttccatctccgggtaagactggcctgattcccatttggagacggcctgtctcgatacctccatctgttcggcaaactgctcctgtgtcaaattttgtttttttcttaagtattgtaaattctctgaaaaactcatattattttctccttctgcagaatatttttataaatttattctacagttgcagcggcgccactgccaccaacctgatgtatcatacaggattttttctgctactttaagttgcatgccctgtttttccattgtaccgaaagaagattagattagcaacagggaatctcttaaaatgtgacccggttacagaatcatcttcaaggatcctgtatactgttgtacatcaagcaaaaaggagttagagaaatgtctgttaaaacaaaacgaagtgtatcggtgaacctaaaacgatgcgtcgcgtgcggagcatgctgtaaggtctgccccagggaggcgatcgcggtatcaggaggctgctatgcggctgcggatttggagaagtgcgtcggctgcggtctgtgtgaaaagctgtgcccggccggtgcgctctcgattcttatcagggaggcacagctatgaaaaagaaacactggtatgactatctctggatatggtccatcatttattttacactgggcttctttaatattttatttgcatggcttggaatgatcgattttcttgtgcctgtttttatcgctgttttcgggagaaataagtggttttgcaacaatctctgcggccgcggccaattgtttgcgctgctggggggaaaatataaatgttccaggaacaggccgacgccccggtttctcgtatcgccctggttccgttacggttttctggccttttttatggctatgttcggaaatatggtgtttcagacctggcttgtggcggcgggggcttcgggactcagggaggcgatcaaactgttctggacctttaaagttccatggggctggacttacaccgcaggaatggtgccggactgggtggcccagtacagcttcgggttctacagcctgatgctgacatcactcttacttggcctgattatgatggttctctataaaccgagaagctggtgtactttctgtccgatgggaacgatgacccaggggatttgcaagctggggagcagaggggagacgcaggacagttaaatgatgacctgcatgctctgcgcacaggtcaccgcaatcaataaaactgcgccgggaaggagttctgttaaacggggcagtttaaagcagtccggcaggataaagtgtccgtcttatcctttcatgtgagaaaccagataacctgaggttatagaataaattccaaattgctatacgccggaaaacggtgaaatcccggcatactgttgaaaaatgcaattgaataagctatgattaaatgtaatcggattatttaacaaataaaatggttatcgaagcaggaggatgagaaaatgaattataaaatcgcagtgattccgggagatggtatcggtccggagatcgtgagagaggcatgcaaggtgcttgaccgtgtcggagagatttacggccatacatttgaatatacaaaagtgcttatgggaggcgcatccatcgacgttcacgggataccgctcaccgacgaggcgcttcagactgcgagggagagcgattctgtgctgttgggcgctgtcggcggcaacgtcggcaattccagatggtatgacgtggcgccaaatctgcggccggaggccgggctgctggctatcaggaagggactcggactttttgccaatatacgtccggcctatctctataaagagcttgcggacgcctgccccctgaagaaagaaattatcggtgacggcttcgacatggtcatcatgagggagcttacgggaggactttacttcggggaacgccatacggaggaagtgaacggcatgcttcaggctgtggacacactcgtatataatgaagaagagattagaagaatcgccgttaaggcctttgacatagcgatgaagagaagcagacaggtgacgagtgttgataaagccaatgtgctggattcttccaggctctggagaaaagtggtggaagaggtggcaaaggattatccggaggttacgctctcccatatgctcgttgataactgtgcgatgcagcttgtcatgaacccggggcagtttgacgtgattctgacggagaatatgtttggagatattctttccgatgaggccagcatgatcacaggctccatcggaatgctctcatcggccagcctgaacgaaggcagattcggactttatgagccaagccacggttccgcgcccgacattgccggcaaggatattgcgaaccctatcgccacgattttatcggcggctatgatgctcagctattcttttgatttagacagggaatcaaaagccgtggaagctgctgtgcagcaggtcctgacggatgggtacaggacggttgacattatggcagaaggctgcaaagaggtgggaacgacagagatgggaaggctcatctgtgagaaaatccgctgacagagctgtgccgaggtaacagttcatgctgcctgaactgttatgtgcagtgtaacgatttaagcagtttgaggccgcgaaaaggctgaaaaggcgatataaagccggataaaagatttaatatagtcacatgacaatagtaaatatatatttattattgtcatgtgagtagtttatctgctgaaaaaaacagaaattgtgtatggaagaaatgatggagttttgcataaaactccatcattcagattatagacaaactatattgcttatatcaggccggccggactccgctttacaaaaattcggaaaaagcgggaaatacttgtaagatttgaaaaaaaagatggaaaaagccatataaaacaggtgaaaaatcgctggaaatgctgtacaataaaagataaaccgaaaaatggacggagacttaaaaaggagacgagaaaagatgaaaagtgatgcagtaagaaaagggatgcagcaggcgccccatagatcattatttaatgcacttggaatgaccgaggaagagatgagaaagccgatggtgggaatcgtcagctcctataatgaaattgttccgggacatatgaatctcgataagattgtagaggcagtcaagctgggagtggcgatggcaggcggaacaccggtggtatttcctgccatagcagtctgcgacggaattgccatgggacatctgggaatgaagtattcactggtgacgagagatttgatcgccgattccacggagtgcatggcgctggcccaccagtttgacgcccttgtcatggttccaaattgtgacaagaatgtgccggggcttttgatggcggcggcccgtgtcaatgtgccgaccgtattcgtcagcggaggaccgatgctggccggaagagtccacgggcagaagaggagcctttccagcatgttcgaagcggttggttcctatgcggccgggacgatgacggaggaagaagtaacggaatttgagaacaaggtatgtccgacctgcggttcctgctccggtatgtatacggccaacagcatgaactgtctgacggaagtgctaggcatgggactgaagggcaacggtaccattcccgccgtatattcggagcgaataaagctggccaagcatgccggcatgaaagtaatggagatgtatgagaagaatatccgccccagggacatcatgacggagaaagcatttttaaatgccctcaccgtggatatggctctcgggtgttcaaccaacagcatgctgcacctgccggcgattgcccatgaggctggtgtggagctgaatatggagctggtcaacgagatgagcgtaaaaacgccgaacctctgccacctggcgccggccggccctacttatatggaagatttaaatgaggcaggcggcgtgtatgcagttatgaacgagctggcaaagaaagatctgctgaatctggactgcctgactgttacgggaaagacagtgggcgagaatatcgcaaactgcatcaaccgggatccggaggtcatcaggccaatcgacaacccgtacagcgagaccggcggcattgccgtattaaaaggaaacctggctcccgacacggcggtagtaaaacgttccgcagtagcgccggagatgttaaagcatgaaggcccggcccgcgtatttgactgcgaggaggatgcaattgcggccatcaagggcggtaagattgtggccggagatgtggtcgtgatccgctatgaaggtccgaagggaggtcccggcatgagagagatgctgaatccgacatcggcgattgcaggaatggggcttggatccagtgtagccctgatcacagacggccgtttctcaggagcttccaggggagcttccatcggacacgtatctccggaagcggccgtgggcggtcccatcggacttgtggaggagggggatatcatatccatcgatatcaatcataatgccctcaatgtacttgtatcggacgaagtgatggaagagagaagaaagaaatggcagccgagaactccgcaggttacgaccggttatctggccagatatgcgtctatggttaccagcggcaacagaggcgccgtactggaggttccaaagaaataaacacgacagttttgccttcggccaaactgcaacaaacgataacaaggctgaattgttacaaataacacaggaaagcagagggaaataaatgaagacattaacaggagcagaaattgtcatcgaatgcttaaaagagcaggaagtggataccgtattcggctatcccggaggcactattttaaacatttatgatgcgctttataaacatcagaatgaaattacccatatcctgacctcccatgagcagggagcgtcccatgcggccgacggctatgccagggcaacgggcaaggtgggagtctgcctcgccacctctggacccggcgcgaccaaccttgtgacgggaattgcgacggcaaacctggattccatcccgatggtggccatcacctgtaatgtggctgttaacctgcttggaaaagacagctttcaggaaatcgatattctcggcgtgacgatgccgatcacaaaatacaactttattgtcaaggatgtgacaaagcttgccggagttttgagaagggcgttcacaatcgccaaaagcggccggcccggcccggtccttgtcgatatcacgaaggatgtaacggccgcagagtgtgaatacgaatataaaaagccggaggaggtaaagagggagtcttccgatattacagaggaagacctggaaaaagccctgggcatgatccgttcctccaaaaagccgtttatcttcgtaggcggaggagccgttgcggcggaggcctccgacgaacttcacgcttttgcccacaagatccaggctccggtcgcagacagcctgatgggaaaaggagcatttgacgggacagacgaactgtataccggaatgattggcatgcacggtacaaagacctctaatttcggggtggcggaatgcgatctgctgatagttgtaggagccaggttcagtgaccgcgtcgtaggagatgcgtcccgcttcgcgtcccatgcaaagattctccagttggatgtggatccggctgagattaataaaaatataaagacggacgccagcgtgatcggtgatgtgaaagtgatactcagaaggctgaatgcccgcctcgatccgattaaccatgatcagtggattgcccatgtggagcgtttaaaggatatgtatccgctgcgttataataaagaagtgctgaccgggccttatattatggaaaagatttatgaggtgacaaaaggggaggcaatcattacgacggatgtaggccagcatcagatgtgggctgcacaatattataagtacaaacgccccagacagcttctcacatcgggcggccttggcacgatgggatacggtctcggagccgcgatcggggctaagatgggatgcagggataaactggtaatcaatatcggcggggacggatgtttccgcatgaatatgaatgagatagccacggcaacccgctataatattccgattatccagattgtgtttaacaaccatgtgctgggaatggtgcgccagtggcagacactcttctacggaatgcggtactcccagacgaacctgaatgatcaggtagacttcgtaaaggtggcggaaggcctgggtgcaaaggcataccgcatcacgacaaaggaggaggtggagccgactctgctcgaggccatcagtctgaatgttccggtggtaattgactgtcagatcgggacagatgacaaggtattcccgatggttccggctggaaaaccaatcgaagaagcctttgatgagattgacttacggattgaacagttgtaaaatagaaaacattattataaacatccgaattttcggatgtttataatggtaacagttcatgctgcatggactgttacaaatcatgagaagagatatgaggaaaaagaggaggaactatctatgagcagagtctacaatttttcggcaggtccggctgtactgccggaagaagtactgaaagaagcggctgaggagatgctggattacaaaggatgtgggatgtccgtcatggagatgagccacagatctaaagatttccaggatattattgacgaagctgaaaaagatctgcgcgaactgatgaatattcccgacaactacaaagtattatttgtacagggaggcggacacgtgcagtttgccatggtcccgatgaatctgatgaagaataaagtcggcgactatatcatcacaggccagtgggcaaaaaaagcgtatacggaagcaaagctgttcggtacggccaatgcggtggcgtcaagcgccgacaggaccttcagctacataccagattgctctgatttgccgattgacgagaatgcggattacgtttacatttgcctgaacaataccatttatggtaccgtgtaccatgaacttccaaacaccaagggaaagcccctggtggcagatatctcctcatgttttctctcagaaccgatcgatgtaagcaaatttggtattttatggggcggcgtacagaagaatgtagggccggccggtgtcgccatcgtaataatccgtgaagacctgattacggaggatgtacttccgggtacgcctacgatgctgcgctataagacatatgcggacaatgattcccttttcaacacgccgcccacctatacgatttatatgtgcggcaaagtatttaagtggctgaagaaaatgggcggactggaagtgatgaaggagcgcaacgagaagaaggcgaagatcctttatgatttcctggatgagagccgtctgtttagaggtacggttgagaagaaagaccgttccctgatgaacgtgccgtttgttacgggagatgaagagctggatgccctgtttgtcaaggaggcaaaagcagccggattcgttaatttaaagggacaccgcaccgtaggcggtatgagagccagcatttataatgcaatgccaatcgaaggcgttgaagcgctggtggaatttatgcgtgaatttgagaaaaagcacgcaaagtgatgagaagcggaggatgtaacggatatgaaaagaagaaagatacactgcctcaatccgatttcgaaactcggaaccggactgtttccggaagaatatgagatagtggattcggcggctgaggcggacggaatcctggttagaagcgcatccatgcatgagatggagttctcggagaacctccgtgcagttgcccgtgcaggggccggagtgaacaacattccgctggacgcctgcgccgagcggggcatagtcgtgttcaatacgccgggggccaatgcaaacggtgtaaaagaacttgtaattgcgggcctgatactgtcatcccgtgatattgcaggcggtattgaatggtgcaaaaaagaaaaagaaaacccgaatattgcaaaagatgtcgagaaggcaaagaaagcgtttgccggccatgaaatcaaagggaaaaagcttggggtaatcggccttggggctatcggcgccgaggttgccaatgcggcggcttcacttggaatggaggtttacggatacgatccgtttatttccgtcaatgctgcctggatgctttccagagatgtgaagcacatcatgtctgccgacacaatctataaagagtgcgattacataacgctccacgttccgcttcttgacggaacgagacagatgatcaacaagacgacgatggcggatatgaaggagggtgtggtaatcctgaacttcgcaagagatctgcttgtaaatgatgatgatatggccgaggccctgaaggagggaaaggttaaacgctacgtaaccgacttcccgaacgtaaagacagcggctatggagcatgccatcgtgatcccgcatctgggcgcttccacggaagagtctgaggataactgcgccgttatggcggtgaaagagatgatggattatcttaacaatggcaatatcaagaactcggtcaactatccggactgtgatatgggtgtgtgcgcgtcggtaaaccgtgttgcactgctgcatatgaatataccgaatatgatcggccagatttctgcaatcctggccgccaccgatatgaacattgccaacatgacgaataagagcaaagagaaatacgcttacaccctgatagatttggaaaatgagctggatgatttgacccgccagaagctgaatgcgatcaagggaatgatgcgtgttcgtgtaatcaggtaatttgctgccgctctgccgaaggctcggcagcagcccggctgaatgcaggttgcgccggagcggccgctttcctaagcggccgccccggtgtttttggttgaatagaaatgagaaggaggagaataaaaatggctgagataaaaccgttttactgcgtgcgtcccgccgcagagtccgcatcgagggtggctgcgctgccatatgatgtttacaacagagaggaagcgaagagagaggtggagaaggagccgctttcctttctgagcatcgacagagcggaaacctggtttcccgatgacgtggatacctatgatgagcgcgtctatgtgaaagccggggaggttctgaaagagatggaggagaaggggatttttgtggctgaggaggttccctgctattatctctatgaacttaccatgaacggccatacgcagaccggcattacggcctgttcttcggtggacgattatctgaaccagatcgtgaagaagcatgagaataccagggaggataaagaggtggaccgcatccggcatgtggatgtgacaagcgcccagacaggcccgatttttcttgcgtaccgctccagggaaagcataaaggcgctggaggccgaggtaaaaaaggaggctccgctctatgattttacttccccggacggcgtgcgccacagagtgttccggattgcacgtcctgagtgggtgtcggctgtcacaaaagaatttgcggccgttgcgtttacctatatcgcggacgggcatcacagagcggcttctgccgtgaaggtcgcgcttaaaaggcgcggggaacatccgggatatacgggagaggaagaatttaattatttcctttccgtgcttttccctgacgatgagcttcagattatggcctataacagggtagtgaaggatttaaacgggctgagcagccgggaatttttagacagagtccgggaaaaatttgaaataacaggaaaaatgcaaagagcgcagggcagcaaagagacgatgggggaggaaattgactcctgcagagtaccttccgggaaaggagaaatctgcatgctgcttgacgatttctggtacacgcttaaggcgaaagaggagattatgacagacgatccggtgggcggccttgacgtttccctgcttcaggatcatctgctggcccctgtcctcgggatcggggatccgaggacagataagagaattgagtttatcggaggaatccgcggaacaaaagagctggagaggagagcggatacggatatggcagtcgctttttccatgtacccgacttccatggcagagcttctgtccgttgcggatgccggtcttctgatgcctccgaagtcaacctggtttgagccgaagcttcgcagcgggctgtttattcacagaatctgatactgttttgcaggcttttaaggtcactgttcatatcccaatgtcgtttagttggagaattacctgacacagagcgggagtgtgctccccagactttatcttcgcccgcagccccaaactacgacaatcttccccggggcaaaagaccttttgaccccaacatcataacattgccgtgtgaacagtaacttttttagccctctactgagtaacctcgccaactgccggatccttcatctggtaaatgcgggtccattccttggtgccgtccactttgacggattcactgcggttaatactcaaaaacttgataatctcatagcagtcgatccagatttcgccgtttccctctttttgggattcatcaaaaatcaactgtattccgaaatgcaggtgggattcatcaatattatttgtattttccgtagcgctgtaaccggtccgtccaagatatccaatgatatctccggcggtgacgatgctgccttctttaaggtttgcctgatatgggtaatccttgcgcagatgggcataataataatatcgttttttatcaaagcttctgattcccagacgccagcctccgtactggttccagccgatggcctccacatagccggattcgaccgccacaaccggagtccctgtctgtcccatcatgtcatggcccagatgctgtctgcggtatccataggagcgtgatacaccgaaatcatcataatggctgtagggaaaattttttgccagcgggtgaaacgccttcaggccgtatttcgtcacccagaccttctgttcgcctgctggcgtcagaggttcaacggacggggcctgattgccggcggaatcagggctttcaccctcgcttccgccggctccgggatcgccttcatttatctgggtatctgaaagggcaaaggcaggcgcttcggattgcggtatctggatttcataatatccgaccatgccgcccaacacggcgttataggcctcaaggtagtaggagtaatacttcagatcttttgtgagttcgtccatagaagtgccgttttttaactgttctgccaatttgtccatgtcggaggaggaataacgcgaaaaatcgcctccgtacctggcgccgagatacgaaagcagttcaatccagtttaaatgaatatcctgctggcaagtagccacatcataccggaatgcctgggtcatagcctcagaggtgacatcaaagtcaacccatttgataaaatcttttgcatttttgccggtggaggcatcctcctccctgtgaaaaatggagaacagattgccggaaaaaggagtggccgaagcagatatcccttttttgcccagaaaccagcctgtgagcagaaaaagaacggccatagcttcaaggccgatgatgattccggttcgtcgtttatgtagaaagagaagtagccggtcgaacccggccgttactttttttataattcggttcaagcagattcccctttcctatatcctgacactgcatcagaccatgagcaatatcatggactaaaagtctgaaaaaagtgtctcttatgatcatatgtctggaaaagtaggaatatgcctgtttgaaaggcctgtggccgtgaacagtaacaacttgatactttacaattgccgtagaaagagaaaggtgagatgattatatggaagataacagaaaggaagcagaaacagaaaattccgtaaaggaaatcccggagacggagaacaggggcggaacatatgccgatatttatgcagaaggcggggctttgggaccggacggagtggatttcagagaaaaaatagggatcgaaactctggaaagaaggcccggctatgcgaaatgtgaaataaagatagaaccatggcatttgaatgtactgggagtcattcacggcggcgtcctgttttcactggcggacacggtgtccgggacagctgcggcagcatccggcgaataccgggttacgacggtaaatggaagcattaattacctgagggccggtaaaaatacgtcaaagattactgcggaggcagtggaaataaagaatggaaagacattttctgtttgcgattcaaaaatttatgatgataaaggcgctcttttagctactactaccatgactttttatcatctccttccaagataaggagaaacagctcagctatgcgatgaaaatactatggagatttagttaagcaggtgaggacgccgccggtacggccagcggacggggtggtggagtgtgtatatgagtctttcgtcccgggggggcatcgctggatggagaaggagatactgtggttttgttttcgcagggcggagccggagagaatgatatccggctggactgcttcttcgagggatagctctaagacagaggaaggcaaagccccccggggttacggacaaattcgctccgaactccgaatgagttcgaagctcaagttgtcccggattttgcccttgtagggctaaaatccgcccggcgcgctttgtctccctctgcctaagagctatcatctctcgggcgaacgtccttccggatatcattctctccttctccgccggaagatgtcggcagtatctccttctcccggaaggttttcgccggaacgaaagactccgccgggtgtaccggccccgtccactggcctgcggccgctgaatgtctcacgcgttaagtgcggggacggaccttgtcgcggccactcagtgctaccgtttacgggagttacgatatgccttcaatgcgcctttatgaaagaattgcactagagttgatatctgcctgccggaaatacgtagtggccgcgacagggtcctccccatttaaggttagagacaatcagcgcccggaacggaccatgtccggtgccgcaaaaatattcgcctgagtcttccgtccccggcgaaaacctgaaccggggaagtaggcggaatcaattgcggaggggacatgggagtccgccggtgcttagcgaggtccctcacgagcttagcactgatgcgcactccaaagagtgcaaacggtccccgcagcaattcgttccggccggattccccctccacgacaacctacccacggggacggaagactcagccatccccctcaccacaccggacatggtccgttccggacgcgtcctccaaacctcagttaaatctccaatttgtattcaaagctcgatgatttccccgtcgtcgggtacgaaaagccgtccgtggtaaaactcttttccttcacttgtatagagctttttgcgtccggaaatgtttttatcctccgtatgccagagaataagggaaggaatatggagacgctcggcaagctcacaggcctctttcactgtgctgtgatgcttttcatagggattaaaacgctccctgtcaccatataggcaaaatgcttcatgaagcagccagtcactgcccgcggcatgatgttcgcaccgtggatttaagggttcatcaccggcgcagcacagcttccttccattggcaagaagggcggtaaaaccgaactgcctggctttagttgagagaatatcgaagaaagtgacggtaagtcccagaatatccatggactcctgatccttcaccggaatcagatggatccgttcgcctatcatgctgtaaaactttttctgcatggtcaggcggcagagcgtgcttatcgtgtccggcagaccgtcatgacagtagatgttcaggcagccctcataactgccttttttcatagcggttgctatcatacggatcatccagacaatacccaggatatggtcggtatgttcatgggtgatgaaaatgtgatggattttagacaggggtacctccatatcctccaggataccgagaataccgtttccgccgcctgtatctaccataaagaattcgccgttcacggtccgtatggcaaaacatgtattatagcacctggtgacggcggcattgccggtgccgaaaacatagagaagttctttctgcatggggaaacctccttaagatagacagtttaactaaatctttattttttttccatcttatgatactataaacctatcataaaagcaaccggacaggcatttcaccacaatcaacggcgttttttgccgtttcattgtatcatttgctgcagtttggcagtaggctgaactgtaacgatacgcagcctgacgggaggcagagggggatgtggaatgagagatctggcatatctgaaattgatgtcacgcgagtatcctacattggagtcggcatccagtgagattgtaaatttgatggcaatctgcggactgccaaagggtaccgagtactttttcagcgatctgcacggggaatatgaggcttttattcatttgctccgcagttcctccggcattatacgtgagaagattaaagaaaccttcggacatattatttccgaggaggatgagatacaactggctaatctgatctactatccggacaggcagattgcaaagcttaagcaggagcagaactatacggaggactggcagaggatagccctctaccggcttgtacagatatgcaaagaggtgtcgtctaaatacagccgttccaaggtgcgcaagaagatgccgccggaatttgcctatgccatcgatgagcttttgcatgtggactataatgacgacaataaaaaggtgtactacagtgagattatccgatcgattatcgacacccagatggcggacagtttcatcatagccttgtgccgtctgattcagaatctgacgattgacaatctccatattatcggggatattttcgatcgggggcctagggctgatattattatggaagagctgatgcagttccatgatgtggatatccagtggggaaaccatgatatctcgtggatgggagcttccaccggcaatccggcctgtatctgcaatgtgctgcggatcgccattagttataatggttttgacgtcctggaggatggatatggaattaatatcaggccgctttccatgtttgccgcaaaggtgtacagtgatgatccgtgcgagcggttcatgccgcgtattctggatcagaatatttacgatgcggtggatcctgggcttgctgcaaagatgcataaggcaatagccgtaatccagtttaaggtggaggggcagattatcagacgccatcccgagtacgagatggacagccgtatccttctgacggccatcgactatcagagaggaacggttgtgatagagggaaaggaatatccgatgatggatatggaatttcccaccatcgatccgtcggatccgctgaagctttctgaggaagaggaagaacttttacatacgctgacactgtcgttctgccacagtgcccttctccacaagcatattaaattcctgtattccaacggcagtatgtataaatgctgtaattccaaccttctttatcacggctgtattccaatgaaagaggacggcagctttgatgagatggcggttaatggaaaagcgtataagggcagggctctgatggattttatcgacaagcaggtaaaaaaagcatatttcctaccggatcaggatccggagaaggaggccagccgtgattttatgtggtatctttggagcggggctaaatctcctgttttcgggaaagataagatgaccatattcgaacattattttgttgaagataaggaagcttccagggagaggatgaatccatattataaattgagtgtgcaggaaaaatactgcgacatgatactggaggagtttggccttacgacgacaggttcccacattatcaacggccatgtaccggtaaagattaaggatggggagactccaatcaaggcgggaggaaagctgtttattattgacggcggactttccaaagcatatcagggaaaaaccggtatcgccggttatacgctgatatttaactccaggcatctggctttggcggagcataaaccctttgacccgaaaaaagaaagtactccaaaggtcagcattgtagaaaagatgcgcaaacgtattatggtggctgatacggatgacggtaaagaactggcaagaagaattgaagacttaaaagaactggtggcagcctaccggaaaggcgctctgaaagagaggatacggtaatacaggctgcgcaagctaaggagtgaacatgaggaaatcagaatttttacaggagcttaaggaagcattgcagggggaggtttccggcggggtgctgcaggaaaacctgagatattatgacaactatattactcaggagacggcggccggacgcagggaagaggatgtaattgatgagataggcagtccgagactgattgccaggacgattatagacagcagcgaggcggctggtgatgtcccggaacagggaagcggctattatgagaatcagggaagcggctatgggcagcaggagaccggaagcagcggaagcttccgttatttcaatctgaataaatggtactggaagctgctccttcttgtaatcgtagtctttttcatggttacggtaatcactgtgattggcggaattttcgcacttcttatgcgctttgcaggcccgattattctgatttggctgatatatacatttataaaaggtatgagacgataagagcggcgggagcagcagtcaaagcggccaaaagcatcggaggaaggcccgtggaagatgttcccggatatcatgattacagaattatataaatagagcctgtgccgggattgtgagggagggatcccggcaaggctcttttcgcgaatatgatgaaagattttgaattaataaacaagaaagaattctgctcgcgggattctccgcggagcggtttttatttaacaggagaagtatcctcttaaacaaaaaggttctatactgaatgttggggtgtgctgaaaagcacacttccaacattcttttcgttgtaataaaatacatctataagaagcctcctaaacgcattatcccgaccaaagtttaatgttatggaggtgaccccttatagatgtaccctaattataccaaggctttccttaacttggaaggtgtttctattaaaaaagtggttcaggcagactctttcattaaaattttcatccagtcccaaccggtagaacagacttgtccctgctgtggggctaaaacaaaacggattcatgattaccgtttacaagaagtccaggacattcccttactgggaaaacaagtaatcctgctccttcgcaaacgccgttacctctgcccatactgccgcaaacggttcacggaaccctattcgttcctccccagctaccaccgcaggacccgcaggctggcattttacattgtctccctgctccggcagaccttttccttaaaacagatcgcagagcttaccggtgtttccgtccagacggtctgccgccttctggacacgatttgctatcctccgcctgaccagcttccacaagcgctttccattgacgaattcaaaggcaatgcttctaccggtaaatatcagtgcattctggttgatccgaaaaagcgccggatcctcgacattctcccggatcggacccaaagccatctggctgattattggcggaacattcccaggaaagaacgcctgaaggtaaagttcttcgtctgcgatatgtggcgcccctacaccgaacttgcacaaaccttctttccaaacgctacaatcatcgtggataaatatcatttcatccggcaggtgacatgggcaattgaaaatgtacgcaaacggctgcagcgctccatgccggtttctctgcgtaagtattataaacgcagccggaaactcattctgacccgctacaaaaagctgaaggatgagaacaaacaggcctgtgatttaatgcttcactatagcgaggagctgcgtctggcacaccgcatgaaagagtggttctatgatatctgccagatggaagcgtatcgtcagcagcagagggaatttgatgactggattgcgaatgcacagagctgtgggatcaaggaatttgaggcctgtgctaagacctacagggcctggcgaaaagaaatcctgaatgcctttaaatacgggctgacaaatggtcccacagaaggatttaacaacaagataaaggtattaaaacggagcagctacggaatccggaatttcaaacggttccgaacccggatacttcactgtacatcataggataaaaaggtcggtaatgcggaggcttatttggcatgcccaaaatcagtaaaacctggaactaaacataaaaagggcccttttcatagaattggggcgggattttaacaaatcccaccccaactattgacaaagagccaacaaaaaaagcatcagtctgccgccgttggctgactaaatgctcttcttaaagctgggccacaaggattcgaaccttgaaatgacggagtcagagtccgttgccttaccatttggcgatggcccaatgaaataacgatctgtattatacttcgggatttgtaagatgtcaagccttattgtaaaaataaattaataaaaaactgattgaaaacggaggacgcgtccgcaacggaccaggttccggtgcggttcggctggtattctgagtcttccgtccccgtggggaggctgatcgtgtgggggaaccggacggaatgaagtgctggtaacagatcagccatgatgtattccgcgaggtgttttcgctgttttttgtgaaaatccgagttgtgcggcgcgaaacggcaaactggacaagtctggccgaatcagctataatagcagcagagtatcggtatagcggcagatgagacaggccattttcataccgatacgacagcgaggtggactatgtatacatttgaaagcagagtgcggtacagtgagatggatgaattcgggaaactttcggtaaccggaatcatgaattatctgcaggactgttccacattccagtcggaggatctgaaattagggctatcctatctttatgataagaagagggcctggtggctgaacacatggcagattttgattgaccgctgtccgggacttggcgagcgtatcaaaatatcgacatggccatatggctttaaggggatctatgggtacaggaattttacgatcaccgatttagaaggaaattatctcgtcagagcagattcatgctggttcttttatgatttggagaataattgtccggccagggtcacacaggacgagatacggggctacggagcaggggagcagaagcttgagcttccgcctgcgcccaggaagattgtgctgccaaaagactgccaaagcgctgagccggttacggcggcgagacaccatattgacacgaaccagcatgtgaacaacgcacagtacgtggagattgccagagagcttctgccggagaaatttactatccgggagctgaggaccgaatataaaaaggccgcggtgctgggtgatgtcatgtacccgaagatcggcaaaacagcggagggatatgtggtatctcttcaggacgccgcgggtaatgtatttgccaacatatggctggccgagaaaagagaggacgaatgacatgatagaattggggaaaatacaggaactggaagtactccgggaaaaggaattcggagtttacctgggagagaagcaggatgcggaagcttccgtgctgcttcccaaaaaacaggtgccggaagggacaaagaccggggacacgatccgggtatttatctataaggattccgaggaccgtctgattgcgactactgccatgccaaagctgcaggtgggggagacggctcttctgaaagtgaatgatgtatcaaaaatcggagcgtttctggacatggggctggagaaggatgtgctgcttccttttaaggagcagaaccacaaggtcagagtcggagaggaatgcctggttgccctttatgtggacaagagcggccgcctggcggcaacaacgaaggtttattcgtatttaaataatcatgcaccttataaaaaagatgactgggctgagtgccgggtatatgaaatcaacgagaatctgggagtttttgttgcggtggatgatcagtattacgggctgattccgaagaaggagctgttctccaagtgccagcccggcgaagtggtgagggcccgcgtgactaaggtcagagaggacgggaagctggatctgagcctcagggaaaaagcgtatctgcagatggacaacgatgtggagcttgtgctgaaggcaattgatgaatttgacggagtgcttccatttaacgataaggcagacccggaggtgataagacgggaattcggcctgagcaagaatgcatttaaacgtgcagtaggacatctcttaaaagaaggcaagatagagataacagaaaaaaacatcaaaagaacaggaaagtgaggaaaaaaacatgaagaaagtaatcagcacagagaaggcgccggcagcaatcggaccgtattcacaggcaattgaggtaaatgggatcatttacacatccggtcagatcccggtaaatccggctacaggagaaatcccggaggggattgaagcccaggctgagcaggtcatggagaatgtaaagaaccttctggagtcggcaggaacctcaatggcgaatgtaatcaagacgacggtgttcattaaagatatgggcgagtttaccaagattaatgaaatttatgccagatattttgagggagattgtccggcacgttcctgtgtggaggttgccagactgccgaaagatgtcctgatggagatggaagcgattgctttgaaataataaccgcaccttccgaacacatccctgagccggtgaggagaaaccgtttcccctgctgctcggggatttttttgttgggaatagaacaatcttttctttgagcaaagtacttgtcaagcggtaatccttcacgtctttttagctttttaaacggtaaaaaattgtctattttagacaaattaaaattaacgtcaaaaggattgcacagaagcggaagtgtaagtttgttgagttttcacaaatttgttttttatttaaacaattgtaccaaatatgaacggtttcgccggaagtagaacattttaatttgacattttggacacttttttttcatcatatacaaaatgctcaaaacagagaattgattttgtggcatttaaaacatagtgtgataagcggagtcatgataggattaatacatacagaatgagaagagacagcgtgactatgtattaaaggcaggaggaacaagaagaatggccagtttatcacttaaaaatgtaacaaaaaaatatccgaacggatttgtagcggttaaagactttaacctggagattgcagacaaggaatttattattttcgtaggaccttccggctgcggtaaatccacgacacttcgtatgattgccggtttggaggatattacgtccggagaactttatattgatgggaaactgatgaatgacgtggaaccgaaggacagggatattgccatggttttccagaactatgcattgtatccgcatatgacggtttacgataatatggcatttggcttaaagctcagaaagatgccgaaggatgaaatagaccggctcgttcaggaggcggccaagatcctggatctttcccacttgctggaccgcaaaccgaaggctctttccggcggacagagacagcgagttgccatggggcgtgctattgtacgtaatccaaaggtctttctgatggacgagcctctgtccaacctggatgcgaagctcagagggcagatgcgtattgagatttccaagcttcatcagagactgggaaccacgattatatacgttacgcatgaccagacagaggctatgacgctgggaaccagaattgttgttatgaaggacggccttgttcagcaggtagatacacctcagaacctttatgacaaaccggctaataaattcgttgccggatttatcggcgccccccagatgaatcttttggattctgctgtcagcaaatcaggctcctccgtgactcttacctttgcaggaaatacgattgtacttccggcagaaaagggaaaagcgcttgaagaggccggctatatcggaaaagaagtgatcatgggtatccgtccggaagatctgcatgacgaggaggaagcggtcaaagcagccgcaggctcgacaattaaggcttctatccgtgtatatgaaatgctcggagccgaagtattcctgtattttgatgtggaggagaacagctgcacggccagagtgaatccaagaacgacggcacgtccgggagatacggtagaatttgccctggatctgtctaaagtacatatttttgataaagagacagagaaggttattttaaattaagagaagagtcaacaagtttgaaagagacagtttaaaaattacatatttaataaagaagaacgctttcggtgatatgtctgaaagcgttcttctttttgtgatggcggtgacctgtgagcagtttggcgtgttttacttgattacacctacaattcttacgttttctataagcatggatagtatcatgtttaaatattaatattcataagcgccatattgtattatctgtatttctttttgtacttccatgttactccgacgtttccggggcaaacagcagcccatcatattccgaactgagttagcgccggatgttttcgtgggaatcttcggtcatataaattttgtttccggccgtcattctcaggtatggcggaacattctgcgaaggaaaaggaaggtatggcagtcacctccggagagaatgattattccgtgggccgataccggatggagtatcggtaatattacggcaatgaataataacataaattatacaaaatttccaaaataaacttgacaatttttatctacattgctatagtagtgttatagacaacagggagggtggaaacgtgctgataaccagagaaaccgattatgcactgcgcattttacgtaccctgtcagatggtaaaagctatacggcaggagagctggcagagagagaaagccttcctcagaagttcgcatataagattcttaagaaactggaaaaagcagggatcgtacagataacgaggggagccagcggaggctgccgcctgggctgtgatttaagaaccgcaactctttatcagttgatagaagcagtggagacaaacgcacgcctgacgtcctgtatgacgcccggataccagtgtgagtggcgggggaggtacggctcgccctgcaccatccatacacaactggcaaaagtacagaatgcaattgatcaggaattccgctccaggagcctgtactggctcctgaacggagaagagaacagttagagtaaagaggaattcccgtaacagttcagactgattgaactgttacgattccccgccgctgagaacggaatcagcaggcggcattctttataatttaaagtggacaaaaattatcaagtataaattacagttttgttcatacaatattaaagcggtaattgaaagagctggtttgatattacctgcctgattcacggcggtaacgatagatgcatgattaaaaccaaaaaggagaaggaggaaagcatatgctgtttacaacgacacaggaacatgaggagctgcgcaggaaaatccgcgagtttgcggagggtgagattaagccacaggcgtttcttctcgatcagaacaatgaatttccggcagaggccgtggaaaagctcgggaaaatggggttaatgggtataccttatccgaaggagtacggcggagccggtatggatatactcagctatgcgatcgcagtggaggaactgtccagggtggacggcggagccggtgtaattctttccgcccatgtatcgcttggatcctggccgatatttgcgttcggaacagaagagcagaaacagaaatacctggttccgctggcgagaggtgaaaaaatcggagcgtttggactgacggagccgaatgcaggttccgatgccggcggcacagagacaacagccgtattaaaaggggattattacctgctgaacggcggtaagatttttattactaacgcgccgaaagcagatacatacgtggtattcgcggtgacgacaccggatatcggaacaagaggaatttccgctttcattgtggaaaagggctgggaaggttttgagtttggcgatcactatgacaagatgggaatccgttcttcctcaacggcagaattgattttcaacgatgtgaaggttccgaaggagaatctccttggaaaagagggagaagggttcaaaattgcgatggcgacgctggatggcggccgtatcggaattgcatcccaggcgctcggaattgcccagggagcttatgaaaatgctctggaatattcaaaggagcgaatccagttcggcaagccaatctgccagcagcagattgtttcctttaagctggccgacatggcgacaaaactgcgctgcgcccgtttcctgatatacagcgcggcagagctgaaggaacagcatgtaccgtacggaatggaatccgcaatggctaaacagtatgcttccgatatcgctctcgaggttaccaatgatgctctccagattttcggcggcagcggctatctgaaaggaatggaagtggagcgggcataccgtgatgcaaaaattacgacgatttatgaaggaaccaacgagattcagagagttgttatcgcttcccatatcattggcaagatgccgaaggaatcaggaggcggcggggcaaagcatatgaagaaaccagcccccatcaccggccttcgcaagaaacagattctgaaagagggaaaggcgcaggaaaaggttgatactcttgtggctgccctgaaaaaagacggctttgatttttccgtcggcataccgttagacacaccgattccgcaggcggagcgcgtcgtgtcggccggcaaaggaatcggggataaaaagaacatgaaactgatcgaagccctggccgtacaggcaggagcggctatcggctcttcccgtccggtagctgagacacttaaatatgtgccgttgaaccgctatgtgggaatgtcgggccagaaattcaccgggaacctatatattgcatgcggaatctccggtgcgacacagcacttaaagggaatcaaagatgcgtccatcatcgtggcaattaacaaaaatgccaatgcgccaatcttcaagaactgcgactatggaattgtcggagacgtaatggagatacttccgcttctgacggcagcgcttgacaatggagaagccaaacagccggcgcctccaatgattaagatgaaacgtccacagctgccgaaggaaaagccaatcggcaagacttatgtctgtgggggctgcggatatgaatataatccggcggaaggtgatcctgacaatgacatcgctcccggaactctgtttgaaaaacttccggaagactgggtatgcccggaatgtgctgaaggaaaagatatgtttatcgaggcgtaagctgaaaggaggctcactttatgtattgtgtaagaaatgtaacggaagatttatattgggttggagccaacgaccaccgtctggccctgtttgaaaatatacatccgattcccaggggcgtttcctataacgcatacctgctgctggatgagaagagtgttttatttgacactgttgactggtcggcctgccgccagctgcttgaaaatatggactatctgctggagggaaaacctcttgattacctggtaatcaaccatatggagccggatcacggcgcctctatcgaggaaatccttctgcgttatccgaaggtgaagattgtcagcacggaaaaggcgttcatgctgatgcgccagttcggcttcggcgttgacagccatgagctgattgaggtacacgaaggtgatacaatgtcattcggaaagcatacggttacctttgtctatgccccgatggtacactggccggaggctatggttacctttgacgtgacaaacggcgttctgtttgcagccgatgcctttggttccttcggtgcattggacggtaaactttttaatgacgaagtgaatttcgacagagactggatcgacgatgcccgccgctatttcacaaatattgtcggcaaatacggccctcatgtgcaggtgctcttaaagaaagccgcaacaattgatattaaagttatctgtccgcttcacgggccggtatggcgctccgacctgggctatttcatcgacaaatacgatcactggagccggtatgagccggaagaaaagggggttatgattgcttacgcttccatgtacggcaacaccgaggccgctgcgcaggcgcttgcatcaaagctgtgtgaaaaagggatgacgaatgtgcatgtatatgatgtatccaatacacacgtttcacagctcatctccgagaccttccgtttaagtcatgtggttctggcatccgtgacctacaatctgggaatttacccggtaatgcacaattacctgatggatatgaaggcgctcaatcttcagaacaggacaatcgccatcatagagaacggctcatgggcatgtaaatcaggcgacttaatgcagaaattcgtggatgatgagcttaaaaatatgacagtattaaatgagaggctttccctggcatccgcccttcatcctgacaaggtaacggagctggatgcactggctgacagtattattgagtcaatgaaatagggatttagttaagcaggtgaggacgccgccggtacggccgctgattgtctcacgcgttaagtgcgggggcggaccttgtcgcggccactcagtgcatccatatgtgtttgatatatttgatgtttcaatacgattgagcggaattgagtccggaagagtatcaccggatttaattccgctcaatttgctgtgattgatggcgatgacctgtgctcggagactggagacaatcagcgcccggaacggaccatgtccggtatcgcgaaaatctccgcctgagtcttccgtccctgcgaaaacctgaaccggggaagcaggcggaatcaattgcggaggggacatcacctgcttaaataatatttattttaatttttttcagacaccctcttttatttttctccgttttgcattaatatagtaatcagggaaaatataaaatcaaaggagagaaggatatgatatcaaatcagatactccagacaaatattgaaggcttgaaggggattaccagggtggacttaagtatctgtgatacagaaggcaaagttcttgcgtccacatttaccggtgctgaggagtatgaaagtgcgattctgactttcgtggactctccggcggacagtcaggttattcagggctatcaattttttaaggtgtttgatgaacaccagctggaatatattctgcttgccaagggcggcagtgacgatgtttatatggtgggcaagatggcggcgttccagattcagaacctgcttgttgcctataaggagagatttgataaggataactttatcaagaaccttctgcttgacaatctgctgttagtagacatctacaacagggcgaagaagctccatattgagaccaatgttaagagaattgtctttatcattgagacacagcatgagaaagatgtcaatgcgcttgagacggtgagaagcctgttctccacaaagacgaaggattttattacggcggtggatgagaaggatattattctggttaaggaagtgaaaccgggagaaacctatgatgatttggagaagacggccagcatgattgttgatatgctgaatacagaggcgctgacgagagtgaacgtcgcttttggtacgattgtcaatgagattaaggatgtatcgcgttcttataaagaggccaagatggctctcgacgtggggaaaattttctacagcacaaagaatgttgtggcctacagcaaactgggaatcggccggttgatttaccagcttccgctccctctttgccggatgtttatcaaggaaatttttgacggaaaatcaccggatgatttcgatgaagagactctgaccacgatcaacaaattctttgagaacagcctcaacgtatcagagacgtccagacagctctatatccacaggaacacgctggtgtaccgtcttgacaagcttcagaagagtaccggtctggatttgagggtatttgaagatgccataacctttaaaattgcgcttatggtagttaaatacatgaagtatatggagaaccttgattattgatgatgagatgttacgtgaacggtaacggtgagatcttgaagcaaatctaaacagagggaaacggggaatgctgtggtatggatcgcgtatctgtgccgcagcaattctatagttgagggatacacagaagatgatagagataatgagtctcaataagacatataaagcgggaaacagggcgcttaaaaatattaatatcacgatagaggacggtgagtttgtctttattatggggcgcagcggttccggtaaatccacgcttatgaagctgcttttaaaggaagtggagccgtcatcagggaaaatcatcgtgaacgatatggagctggggaagatgcccagaagatatgtgccgaaatacaggaggcgtttgggggtagtgtttcaggacttccgccttttaaaggataagacagtgtatgaaaacgtagcctttgcccagcgtgtaatcggtgtgccgaccagaacgattaaagagtcggttccggagatgctcaggctggtggggctttcatcaaaatataaatcattcccgaaccagctttccggcggggagcagcaaagggtggcgattgccagggctctcattaattcgcccgaggttctgctggcggatgagccgaccggtaatctggatgcgcagaattcaatggagataatgaggctgttggaagaaatcaacaacaggggtaccactgtagtcgttgttacccacagtcaggagattgtaaacaggatgggaaaacgggtaatcaccctggaccgcggagttgtggcggaggatgagataaaaggcggtatcgcatatgaggcttagtacatttacatattgcctgaaagaaggtatgaaaaatataggcaggaatatctggttttccctggcttcgacggctatcatttcagcgtgcatttttttattctgtatgttttttgccctggtggccaatgtacagtatatggtgaaaaatgcagaaaccacagtgggaatcactgtatttttcgatgaaaatatggcggaagcagatattctggcaatcggaaaagagatagccgccaggaaagagataaaagaaacaaagtatatttcagccgaggaggcatgggagacattccagaaggaatattttaaagatgcggaggaactggcggaaggctttgcggatgataacccgctggccggatcggcatcttacgaaatttatctgaaggatatcgcggatcaggatgtcattgtgtcctatctgaatacgattgcaggtatcaggaagattaactattccaatgacacggcatcagggctttccacctttaataagatgctggggctgatttcggcagtgattattgcaatactgctggcggtggcggtgttcctgatcagcaatacgatttccacggcagcggccttccggaaggacgagaacaaaatcatgcgtctgattggggccaccaattttatgatccgcgccccctttgttgtggagggtattattatcggatttgccggggcggctattccgcttgtcagcgtttatttcctttacaggagcgcggtggaatacatgattgaaaaattccatatcatatctaacattattgagtttataccaatcgacaccattttcccgtatatgatcgcagtggcggtggctctcggtgtgggaatcggttttgtcggaagcttctttaccattcggaaacatctgaaggtataggagtctgtgcataaggagcaaaagatgaggcataatgcagcagtaaaaagaacagttctggctattcttctggcatccctggccgcagcgcccgcatatggggcctctaaaaaagacgtggacagcgccaagggaaagatttcttccatcgaggaggagaaaaagaagacagagcaggctatcaaagagctggaaacactgaaagcggatacggaaacctatgtaaggaagctggactcccagcttgagacgctgaatgcggaagtgaacaggctggaaggaaatatccgtgataaagagaagactattgaagagaccgcggtaaagcttgatgaggccggaaaagtggaaaagaagcagtatgaggccatgaaaaagcgtatcaaatacatgtacgagaagggtgacagcagttacctggatcttcttctgcagtcgaagtccatgtcggagcttttaaacagagcggaatatatttcaaaaatatctgaatatgacagaaatatgcttgatcaatatgctgcagtcaaagacgggatagcagatgacaaggcgcagcttgagaaagagaaggcggagctggttgtgctgcaggagcagacgacaagcaagaaaaattctgtggagacgctggtcaatgaaaaatcggcggagcttaagaaggtaaattcccagattgggaccaagacggctcaggtggaagcttatgaaaaggatatcaaagctcaggaagataagattaaacagatagaggcggagatcaaaagacaggaagaggaagccaggaaaaaggctgaggcggcagggcagaagtataatacggtaagtattgggaatattaaatttatatggccgtgtccttccagcagcaggattacatccggcttcggaggaagagagtcaccgaccgaaggcgcttcttcaaaccatcagggaatagatatcggcgctcctacgggaagcaatattgttgcggcggccgacggaactgtgacaatttctacatacagctattctgccgggaactatatcatgttaaaccacggcggcggagtatccaccgtgtatatgcattgttcccagctgctggtatcagccggtgacacggtaaagcagggacaggtcattgcaaaagtaggttctaccggctattctaccggaccgcacctgcatttcggcgtccggctgaatggaagttatgtaaatccggcaaaatatgtaagcccatagggaaacggttcggtactcttactgaacagaggccctaagttcaaaaacaaacttaacgacagtggtgggcggagagtaatcggttttcccccactgccatgagatcaaccacgcttctacgtaggatgcagtcgcactctgacaatatatcgagcgtggagtgaaacaatatcaacccataaattaggaggcattagagatggacaatagaagtaaattctggagaggcgtcatggtcggcgtccttgttacggcattcgcctgcctggtgacagtggggacatcggccggaatttatatgtttggacggcgcgtcattgacaatcaggtacaggtgcaggcggagcagggaaattccggggcggaggcgagcgccgacggtcaggctggcaatcagactctcgatatggagcgcgtcaacagaaagcttacggagcttcagacgattattgacaagaagtacctgtttgaagataaggtggaggtggaaaaggaagaatccggaatttacaacggtttccttttcggcctgaatgatccctacgcagtttactatacgccggaggaactggccagctttatggatgagacaaacggttcctactgcggtatcggagcgatggtttcacaggacaggaagacaggcgtctccacgattatccgtgtatttgaaggcagccctgccgagaaagccggaatccgtccgggagatataatctttgccgtaggcgatacggaagtaacggggatggatctgactattatggtcaacaactatatcaagggcgaggaagacaccaacgtagagattacggtttaccgggaagatacaggggaatacgtggaccttaccgtgacgagaaaaccggtcgatgtacagaccgtaacaggaaaaatgctggatgacgagatcggctatatttccgtaattgagtttgacaaggtgacggatgcccagttcaagcagaagatagaggagttaaacactcaggggatgaagaaactgattgttgacttgagaaataacccgggtggtgaattgaatacggtagtatccatggccgattacgtcctgaaggacggcgggcggatccttacggtagcggataaagaaggcgcagaagaggtatatgatgccaaagacggtcacagtctggagataccgatggtggtattggtaaacggcaactccgccagcgcttctgaggtatttaccggtgcgctgaaggattatgaggcggccacagtggtcggtacacagacattcggaaaaggaattgtgcagacgctcttcccgctttccgacggaagcgccgtaaaactgacgacaaatcattactatacgccgaacggacacgacattcacggagaaggaatcgctcctgacgtagaggtggagctgaatgaagaggctgccaagatgcctgtaattccggaggatatggataaccagcttcaggaagcaatacgcataatagaggaaaaatagtggagatttagttaagcaggtgaggacgccgccggtacggccagcggacgggatggtggggtgtgtatatgagtctttcgtcccggggagagattgtcgtggtttggggctgcgggcgaagataaagtctgcggagcacactcccgctctgtgaaattcatcgcgctgctaagctcgacaggacctcgctaatcagcgatggatttcaacggcatccgcagactttatcttcccctccgccccaaggctatgttttcgccgggacgaaagactccgccgggtgtatcggccccgtccgctggcctgcggccgctgattgtctcacgcgttaagtgcggagggcggaccttgtcgagaccactcagcgctttcgtgtgcggaaaatatgatatgccttaaatgcgcccttatgaaagaattgcggaaggtttgatttcagtttgccgtaaatacgtagtggccgcgacaaggccatccccatttaaggttggagacaatcagcggccggaacggaccatgtccggcgtcgcgaaaaccttcgcctgagtcttccgtccccggcgaaaacctgaaccggggaagtaggcggaatcaattgcggaggggacatgggagtccgccggtgcttagcgaggtccctcacgagcttagcactgcctcgtactccaaagagtgcaaacggtccccgcagcaatccattccggccggattcccccctcacgacaacctccacccggggatggaagactcagccagtcccctcaccacaccggacatggtccgttccggacgcgtcctcccaacctcagttaaatccccattttatttaaaatacttctggcaacgctgattccgttggcagacgcctgctgaagtcccctggtgacggaagcaccgtccccgatggcgcggagcccctgtacgctggtctcaaaatcagtgttcacaacgaccttgttggagtagaatttgacttctacgccgtacagcagggtttcatcgctggcaatgcctggagtgaccttgtcgagtgccaggatcatctctttaatatctaccatgatgcggtgcggaagaactaaggataaatctcccggaacagcatcttttaaggtcggaatcaggttgttgcggcagagacgttcctctgtcgttcttctgcctctctggaaatctccaaaagcctgaaccagaattttgccgtcacagagcatattgctgagctgggcgatgtgtttgccgtattcaatcggcgtcttgaaaggcttggtgaagtttttagataccagcagcgcaaagttggtattattcgttttatattctttagatttataggcatggccgtttacgacagcgagcccgttctcgtaatattccgttgccacttccccggacgggttggtgcagaaggtacgcactttatcgtcgaaagtaggggtgtagtagaccagcttagcctcgtaaagattcttgttcaggaattccatcacctcgtcgcggacttctacacggacgccgatatccacggtaccgacttccgtctcaatgccgtggcggctgcagatatggctgaaccagtcggagccctcgcggccgatggcggcgataatctcgcctgcgctgtaggtttctttactgtctgttacgacagctttggcaactccgttctcaatgataatatcatcgaccattgtgttaaatagcatatgtacgccctgttctatcagatgttcctgaaggcgggtataaatcttataaccttcctcggtaccaagatgacggatgggacattcaatcagctttaagttggcggtaatggctttgcgccgtatttcctctatttctttctgcttgtcaattccgtagacgttttggtcggctccgaatttcagataaatatcatccgattcccggatcagctcctgcgctctgtcgtagcccagaatctccggaagattgccgcccacatcgggagacagggaaagcttgccgtcggaaaacgcccctgcgcctgcaaagccggtggtgatggagcatggtttgcatccgacgcacacctttgtcttccgttttgggcaaacccgcttttcaatgggccttcccttttctatcattaaaattttcatatccggtttttctttaattagttcataagcgcagaaaataccggacggtcctgcgccgatgatgattacatctgcctgattcatttcgttcataaatattgccccctttaactttttattatatctggccggctggagtaaataaaaaaccaaccgcggaatggtaatcgacagccaggctgccgcctatagtcaactattccggtagttggtagaaacgttcacccaatcatgaacttatataagcacaacaccccaattttaccataataaaagatagacggcaagagaataatggagatttggttgaggttcggaggacgcgtccggtgtggtgggggattctgtctgagtcttccgtcccggcggcgtcctcatctgcttaattaaattcccatccctttacaacaccgaaaaaacctgataaaatggctgaatacagcgttagatattccggaaaaggaaattctaacgctttaaggcgtgcctgtggcagacaaaaatcaggaagcagaatcattttgatcgtataaaggagaaaatatcatatgtatataatagcaggacttggaaatccgggaaaagagtacgcgggcagcaggcacaatgtaggatttatgacgctggatgaactggcggaccggtataatatcgatgttagggaaaaagcgcataaggcattaattggaaaaggaatgattgagggaaataaggtaatactggtaaagccgcagacctacatgaatttaagcggggagagcatccgttccgtaatggattattataagacggaaccttcggagtttattgtcatctatgatgatatcagtctggagccggggcagataagaatacgcaagaaaggcagcgcaggcggccataacggcattaaaaatataattgcccatctgggaacccaggaatttcccaggatccggatcggggtaggtgagaagccggccaggatggatttggaggattatgttctgggacatttttctaaagaagagaaagatcggatggagcaggcatttaaggatggagctgcggcagccgtggcgatgatgaacgatggagttgataccgcaatgaaccgtttcaacggtgcggccaggacagtgaaaaaaacggcggaaaaaccggaaaccgaagtataaaagcggagacaaagagagttatactcagaaagaacggggaatgaaatggaaagcatttttgcaaatccacttgaagagttaattgaatttggggatatgaaccgggagctggagagaggacagggacctctgctggtgagcggatgcatggattcacagaaggcgcacctgatatcggaactgacaaaggagataccatggaagctgattgtgacttatgatgatcagagagccagggagctttacgaggattaccggtgtttttctcccgatgtatatttatatccggcccgggatctgctgttttacagctctgatatccatggaaacctcctgacaaggcagaggatgcaggttatgaagcatctggcggaggagagcgggggcgctgtcataacgacggtcgacggcctgatggatcacctccttcccctggaaaatctgaaacggcagtgtctcagggttggaagcggagaggccctggacgtggataagcttaaggtatccctcaccggaatgggatacgagagggttgcccaggtagacggaatgggacagttttccgtcagaggcggtattattgacatctatcctctgacagaagatctaccgtttcgaatcgaactttgggggatgaggtggattccatccggacctttgatccggaaagccagagatcggtggaacagcttgacgaggccctgatctatcctgcgacggagctggtccttaccagagaagaggcggcggccggtatcctgaagatagaaaaagaaaagaataaatacgtcaaatcactgagggagcagatgaagacggaggaggcccaccggattgagtcggtaatcagcgagctgacggaaggccttaaggagggatggcgggttcatggtctcggtagtttcatccggtatttttgccctgagacggtatcgtttctgcggtattttccggagggcagactgaccgttttcatggatgagcctctgcgccttcgcgagaaagcggaggtggttgaggaagagttccgggagagcatggttcacaggctggaaaacggctatcttcttcctggacaggcggactttatgttcccggccaaagcggtcatggcgatggctgcgggggacaggaccctgatgatgcttggactggagcagaaacttccaggaatttccgtgaaaaagaaatttggccttacggtgaaaagcgttaactcctatcagaacggatttgagcttttaatcaaggatctgacaagatggaagaaagaaaaatacagagtggtactgctgtccggctccagaaccagggccagccgtctggcgggcgatttacgggagtatgatctgagggccttctgcccggacgaagggcagatccaggtgctgccgggagagatcatggttacctacgggaatcttcacagggggtttgaatatcctctgatcaagtttgtcgtgattaccgaaggagacatgttcggcggtgtgcgccagaaaaagaagagaaaaaagacagcctatcaggggaagaagattcagagcttttcggaactggccgtaggagactatgtggttcatgaaagccatggacttgggatttaccgcggaatcgaaaaaattgaacaggataaaatcgtcaaggattatattaaaatcgagtaccgggacggagggaacctctatcttcccgcgacgagactcgaaggaatccagaaatatgccggagccgatgcaaaacagccgaagctcaataaactgggcggcacagagtggaataagacaaagacaaaggtaagaggggccgtcaaagagatagccaaagagctggtggagctgtacgcctccagacaggagagcgaaggctatcagtatggggcggatacggtatggcagagcgagtttgaggagatgtttccctttgaagagacggaggaccagctggaggccattgaatcgacaaagagggatatggagagcaaaaagattatggaccgtctgatctgcggcgacgtgggctacggaaagactgaaatcgccctcagagccgcttttaaggccatccaggagggaaagcaggtggtttacctggtgcccacgacaatccttgcccagcagcattataacacctttgtgcagcgcatgaaggactttccggtccgggttgatatgatgtcgcgattcaggacggccacggagcagaaacggacgctggaggatttgaaaaaaggctttgtcgatgtgctgataggaacccaccgtgttctctcaaaagacgtggtgtttaagaatctcggccttctcatcatagacgaggaacagcgttttggtgttgcccataaagaaaaaatcaaacagctcaaggaaaatgtggacgttctgacactgacagccacgccgatcccaaggacgctccatatgagtctgatcgggatacgtgacatgagtgttttggaggagcctccggttgaccggcttccgatccagacctatgtaatggagtataatgacgagatggtgagggaagccattcaccgtgaacttgccagaggcggacaggtgtactatgtctataaccgggttaataacattgatgagatcacgaatcatgtcgcggctctcgtaccggaggcaaatgtcacatttgcccacggccagatgcacgaacatgaactggagagaatcatgctggatttcgtcaatggggacatcgatgtgcttgtgtccacgactattatagaaacaggcctcgatataccgaatgccaatacgattatcatacatgatgccgaccggctgggcctttcccagctttaccagataaggggcgcgttgggcgttccaacaggacttcctatgcatttttaatgtaccgccgcgataagctgctgcgggaggaggcggaaaaaagacttcaggctatccgggaatttacggagctgggaagcggaatcaagattgctatgcgcgatttggagcttcgcggcgcaggcaatatactgggagcggaacagcacggccacatggaggccgtgggctacgacctctactgcaagctgctgaacgaagcagttctggcgcttaaagggcagaaggaagacgagggctttgagactgtggtagactgcgatatcgatgcctatattcctgcatcctatatcaaaaatgaataccagaagctggatatttacaagcggatttccggcattgaaaaccaggaagaatacatggatatgcaggacgaactcatcgaccgtttcggcgatataccaaaaccggtggaaaatctgctcctgatagcgcagattaaagcgatggcccatcaggcaggcgtgacggaggttaatataaaccgtcaggagattacactgagaatgtataaaaatgccggaattgacacaacgggcattcctgggctgatcgaccggtacaagggggcgtttgttttcaggacaggggaagtccccacctttatctatcaggatcgcagagcaaaaaacaaggattgcacggcaatgatagaaaaagcggaggaaatattgggcgaactgggcaggatggcggtcaaggcgtccgtgtgaggagataaggcgccgggaaaaaagaaatgacaacctgtaaagagtcgtgttatactatgggcaaaggacaaaatagttgctgcccgcattgtctgaaaggagcaccggcttgaacccgcttatttcactgctgaatgacgtaattgtaattttatttactcttgccatatgtaccaggatattttcactgcggaaaaagaatctgttttataagacccttatgtatgggggatgcacggctatattcctggtatatgcacttgccgccgggttttacggcatggcttcgtcggtagcctctgttctgtgtgtgggagtcccgggcctcttcttatttctcggcgtctcaaagcacagggacagccggttttgcgtcacgttcttttttgtgcattccctggccctaatcattggcttcacgggccgctacatcgggatcctgacatcagacgcaggcagtgtgctcagcattgcagtcacagcggggctctatctgatggttataaagcttgggaacaggcattttgagagatatcacgaactgcttgagctggttgacgtcgggtggaacgggatggcattttcaatgggcctgatctatttttcactggtattctttgccgcttatcccaaaccgatgattgagcggctggagtatgggcctgcatacctggtttattcgggtgtcatcttatcatgctataacatttttctcaaatcaataataaaaacgcgccggattaccgagcagaacaggattttggagcatgagaaggagatttacaaaattgcctatacggactccctgacgggactggggaaccgggcggcttatgtggatttactcaaccgctatgaacgggaacagcgggagggccggatttgctgtatcatgatagacttgaataatctgaagacggtcaatgacagcaggggacatcatatgggagatatttttcttaaaatggcggcggacgccctgagacaggcatttaccggcaggcgcgtctccatattccgaatcgggggcgacgaattttctattctggcggaggagatttccgagaaagaattgaagaaatgcctgggggaagcaggccgtctactgcagaaaaaggaggaggagaccgggcttcattttaattttgccgccggctgggagtttctcgaccggaatatctcctgcctgacgattgaggacgcgttcatgaaggcggatcagatgatgtaccggaggaaaagactgcaaaaagaagcgggaggaatgaagggcagaaaaggcttcgagtgatgcagtggtaacaatgcatatacataaatttattaatacaagattgggagattagatgtggtacaaaaagcacagccgtacaaatatcaggtgtacaatgagataaaaagaggaatattgaagggccaatacgtgccgggggatgtactgacggagagaaggctgtccgaggagatgggtatcagcaggacgccgatccgtgaggcaatgcagatgctggagcatgacggatggctggtggtggagacctacaaaggcgctctggtgagggaatttgatctggaatatgtactggaagtattaaaaatcagaaaatcgctggagatgctggcagtcgaagatgcagtgcaaaatgcggcggctccggatctggaagagctggaagagatagtctgctgccagagggatatgctgaaccattatgatgagtatgactttattgaaatggaccgcaaattccaccagaagatttatgagctgagccataacaggaccctgcagggacttttaagtaattttaatgatattatttcatttttcggaatccgggcgctgcagaagaaggagcggaagctgacgacgatggatgaacaccagaacatactaaacgccatgaaaagcagggatgccggcgcagccgtccgcgcgatggaagagcatatgacggagacgttcaacaacatcgagaattatatgaaatcccgccgaaaccattaaaaaccggtctgccatatctgacacacagaacgaccggttttttccgtctggaaaaccggaatctggctatcgtgtaaatactgcctaaaaagaacaggaaaaagggaagaggcttgacaataatgcacaatcgtgttatcttattctaagtggtataccatatatcatatattacatacgatatggcaaatagaggagtgagaggtaaacgagatgaaagtcagtattgttcagatggatgtgcggcttgcagatccggaatacaatttttcccatgcggaagaactgatccggagcgcggccgccgaaaagccggatgtcatctgtcttccggagacgtggaacacgggattcttccccagggagaacctggagatcctgtcggaccgggacggagtgcaggtaaagaagaggattggttctctggcaaaggaactaggggttcatattgtggctggttccgtagccaacgtaaagggggacggcgtatataatacggcgtacatatttaaccgtgaaggaagctgtattgcagagtatgataagacccatctttttacgccgatgggcgaacaggatttctttgagctgggggatcataccgtcaactttgaactggacggggtggcctgcgcgatggttatctgctatgatatccgttttccggaactgatccggacccttacgcttcggggcgtggacgttctgtttgtagccgcccagtggccgctgcttcggaaaggacattggcaggtgctgaaccgggtgagagccatagagaaccagtgctttgtcgttgcagttaacggctgcggaatggcgggagaaacaaaatacgcaggttattccgctgcaatcgatccatggggagagacgataacgggagcaggagagagcgaggaaatactggcggcagaactggatcttgacatgatacgcggcatccgggagagcatcaacatatacagggacaggcgtcccggcatttatcacttaggggtttgaaaggaaacggataagatgagtaagatgaaatttctgttaatgacgaaagacggtgcgcaggagaaagaaataaattatgatcaggtattcgccatcggctatgcaggccggaatatggagaaaaccatggagcatatcagggagctggaggaacagctcggagttccggccccgaagaaaattccgacgatatttcagtgcggcacgtatctgctgacccaggaaaaagacctgcattttataggggaaaagacctgcggggaagtggaatatgtgatggtggtgaccggaggaaagctttacataggacttggcagtgaccatacggatcgcgaattagagggaatgagcgtaccaaaggcgaaacagatttgcgccaaaccgattggggcaattctgtgggactacgaagaaatcaaagaacactgggagaccattaagctatattcctatcagacggtggatggtgaggagattctctatcagcagggaactctggcagacatcatggatccggggatgattctgaaggagctggatgaaagagtgggcaatgttacggacgctgtgatttattccggtacggttccgctgacggaagggttccgttatgggaccgaatttagatgcgagatggacgacgaggtgttgggaagaaagttatcattaaattacaaggtgattacagtcagtgaggaggaacggtaaaatgagaaagttatttcgggcagtattggtatcaatggcagtggcagccgcgttaacgggatgcggaggcaaaaaaagtgaagctccggcagacggcgggactaaaaaggaggcggctaaagccgcagacgcaattgagatcaaggtggctaccgtaggcaatgaaaagcaccagtccacaattgccgcaacgtattttaaggaaaaaattgaggaattatcaggcggtcaggtaaaagtcacgatttatcccaacgcttcattaggaagtgaacgtgaggcggccgagggcgtgaagctgggaaccctggagatgacaattgtgacgacagacggaacgctcccgtcctgggtgtcggatgtacagcttttatcgattccgtatctgtttgaaaataaacaggaggcctactacatactggacgaagtacttgaaccggaattcgaaaagctgtttgaggcgcagggctttaagcatctcggctttgcggagctgggcttccgccatttcaccaacaatgtgcgcgaagttgtaaaagcatcggatatggaggggctttccatccgtgtccaggaggctaccgtatggttcagcctgatggactgcctgaaagcaaggggaacagctcttccgtttaatgagctgtatacggcgcttcagcagggaacggtggacggacaggagaacccgattgtctccatcgcttcctccggatttaatgaagtgcagaaatacatggttctggacggccatacctatggcgccgagagcgttatcatgaacctggatttttacaacaagcagtctgacgaggtgaagggctggattgacagcgctgttcaatatgcggttgaggaacagagggcagccgtggattccatggaagcagagtatatggaacagattaaggagagcggcgtaaaggtcagcgaaccggatatcgaaagcttcaaggaggcgaccagagatttctatctgagggatgaaatcaaagagcttgttaacccggagttagtagagcttgttatgcagaagcttgaagagtataagaacagcgggaactaaaagcacagagaaaacatatcgtgggtgagagacttaacagagaggttcgagtatgaaagtgatcaatctagtggtggataaagtgataaaggccgtcatggcggtcagcggcattgttctgctggcagtgacgttctggcaggtggtctgccggtacgttctgaaggcgcccctgccgtggagccaggatataatcaggctgagctttacgtatcttgtattttggggagcggcctattgtgtccatgaaaaagccaatctgaacgtagacgttctgttgacttcgcttccgaaggtgattggaaagctgttggaaatcatcataaatgttgtactggtcggatttttcgtattcctgttatatatgggacttcagttcgcacagacaggtacgacccagacaacgtcttatctgccgattccgatgtcctggtattatatgagcattcccagcgcggcggccttcatgattttttacatgattggaaatctggcggtacaggtaaaggaatttattcagttgaaaaagggggagaaataggatggcattaattatactgttattcggattatttatagtcggagtgccgatttgtttttcccttggtttaatctccctttacggagtggctgcggccggttatcccctgtccgtcatcacccagaggatgtttacgggagccgacagtatttcgctgattgccatcccgctttttatcctggcgggcggtttgatggtccagggaggcatgtcgaggcgaatcgtggattttgcggatgccctgattggacatttccccagcggacttgccatggtcagtattctggcctgcatgttctttgccgccattaccggttcggccattgcggcgacagctgccatcggcggtatcatgattcctcttatgaaggaaaaggggtatgaaaatacattttcggctcctcttctggcctgcggcggttccatcggtccggttattcccccagcatccccctgcttctttacgggacaatggccagtgtgagtatcggaaagctgtttatcggcggttttataccgggaattatcatgggcctcggcctgatggtttacagctactatgtaggtaaaaagcgtcattatgtgggacgtgaacagaaggcgccggcgggcgaagtgctgaaaacgggaaaagacgccctgctcgcattaatcatgcctgtcattatcatcggcggaatcatgagcggaatttttacggcgacggagtccggagcgattgcctgtgtctactccctgattatcggaatctttgtataccgggagctgaagattaaaagcctatggggcgtatttatcgactgtgcaaaatcgaccggtcaggtgctgatcgtggttgccttcgcctccctgtttacctggattattacggtgaatcaggtaccgcagcaggtcagcgctttactgaccgagaatattggaaataaatatctgatgctgcttgtcataaacgcagtgctgctggtggccggaacctttatcgacacgaccagcgcgctggtcatcttcacgccgctgtttcttccgattgtacaaggaatgggaatcgacctgctgcatttcggcctggtcatgacggtgaacctgacgatcggcatgtgtacgccgcctctcggggtatgcctgtttgtatccggtaccattgcggaggtatccttaaaagaccagatgagagatcttcttccgatgctggcggtcctgctgattgtcctgctaattattacatatataccggaaaccgttacgtttttgccgaatctgataggataagcctgttatttaaaattttcgccttgacaaacagtacaaaacttcctataatgtcaagtacttaaactaaatatttttaagtaaaggctttgaagggaacaagtagttactgtatgacgcacagaaagcagccggttgatgagaggcgcgcgtttcggcaggcggacgaatacatcccggagctgcacacccaacggaattgttattggttcccagtaggctgtgacgtatcaggcacacgttatcgtgccggagtatatcggatttttgatgtacttgctgaggcagacagtgcgagctgtttgtgaataaaggtggtaacacgggatttcgccccgtcctttttatgaaggacggggcttttttggtaacagttcagccatgatgtattccgcgaggtgttttcgctgttttttcatccgggcctgtgtgccaacgggctttgagctgtggtttcgtccttgaaacgattggaaatatgaataatttcatggaaggaaaaggagaagtaacatgaaaatttacgaagaactcgttgccaggggcctgattgcccaggtgaccaatgaagaagaaatcgggaacatgattaacgaaggcaaggccacattttacatcggctttgacccgacggccgacagcctccatgtaggccattttatggctctctgtctgatgaagcgcctccagatggccggtaataagccgattgccctgctgggcggcgggaccggtatgattggggatccgtcgggcagaaacgatctgcgccagatgatgacggtggagacaatccagcacaactgcgactgtttcaaacagcagatgagccggtttatcgatttttcagaaggcaaggcaatgatggtaaataatgcggaatggctcatgggactcaattatgtggagctgctgcgcgaggtaggaccgcatttcagcgtcaacagaatgcttgcggcagagtgctataagcagagaatggaaaagggattaaccttcctggaattcaactacatgattatgcagagctatgatttctatatgctgttccagaaatacggctgcaatatgcagtttggaggggacgaccagtggagtaacatgctgggaggtacggagctgatccgccgcaaattaggcaaggatgcccatgccatgacaattaccctgctgttaaactcggaaggaaagaaaatgggcaagacccagtccggagccgtatggcttgatccgaacaagacatcgccctttgagttctaccagtactggagaaatatcgcagacgccgatgtgctgaaatgcctgagaatgctcacattcctcccgatcgaacagatcaatgagatggataagtgggagggaagccagttaaatacggcaaaagaaatccttgctttcgagcttacaaacctggtacacggtgaagcggaggcagagaaagccaaagaagcttccagggctttatttacaagcggaaatgctgccgatatgccgacggcggagcttacggaagaagattttaacggagacgagattgatattctcaccatcctgcagaagtccggcctggctccttcacgttccgaggcgcgaagaaacgtagagcagggcggcgtggctgttgacggtgaggccgtgaaagacagtaaggccgtatttaccaaggcacagctctccggcgatggaatcgtagtgaaacggggaaagaagaattttaaaaaggtaatattaaatacaaacggtcagtagggaatatccggcgtgctgcgaacaatagcacgttccgcaatgcacggaaactgcaaaaaacgcagttttgcgccgtataactcgggagtttcgtgcttaatgcgcacgaaaataccccgcggaacacaaccgtgtgaacagtaacgtaaaaggacatatggaatccatatcaggtttccagatgtccttttttcgtggaaaaatccgcagaatccgtttaccgagggctggaagcggatatggtaaaaatatagaaagcagttggttaaatagctgaaaataacaaggaaataaaaattgaatagcaattatcgacaaaaatcaggctttagtttcggcatgaagcacaattgacaagtaaaaaggagtgctttatactaaatgtattaaataatacaaaatgtattgcgcaaaacattttaaagggaaagagaggtgagggaaggtaacggaagttaacggttcatgccgtctgaactgttacgcaggagacgtaagggagaggattatggacaacagtgatacaagatacagaggggacgccggctggggccggcaaagttcagagagtaaaggagaaaggtatgacactgacagatgttttaattgacttttcgatgattagtattcttcttgtggcgggggcatggctcagaagaaagataagatttttacagatatattatatcccggtttcactgatcgcaggtatattggggctgcttttagggcctcagattttaggaaaggtttcaccggtatgtttttcattttcctcatcgattggccaatgggcgggagttttaagcgccattgtcttcagctgttctttcctggggctgaaactggaaaaggtctcgggcgaggcgatgcagacctattttttagcggggaccattcatcagctgcagattatcgccggcctgaccgttacatttattcttggcctggtattcgcggatttgaagttcggatttggaattcttcccgtactgggattttacggcgggcattccatggcgattgccggcggtacgatttttgatgaagcgggatatatggcgtcaggcgcacaggtcggagccacatttgcgacaatcggtcttttgaccggggttatctgtggaatgttcgaaataaaccgggcggcccaaaaggggattacgaaggtaaaaatgaaaagggaggaaatgccggaaagcatgctgacgggatactatcctgaaaatgaaaggccgtccatcggcaatgccgtcacttcctccgcagcaatcgatccattgggggctcaggtgatgctggttggatttattattctttgcggccatatactgcgtaccggactgatccggataaatccgtttttcaagaatcttcccctgtttgcctgctgtctgatattcagcgccatattctgtgtgctgacacagaaggcgaaaaaggtgaacgatatgatagacaggaaaacagtggtccgtatttccggaagcgcgctggaatatatgattacggcggcgctggcgacaaccagcatcagcgtatttacgacgtatgcggtgccgcttatcgtggtcggagcatcagtggctttagtgacctggttcgccagcttcgtcctgtcaaagtgggtactgccgaaggatgactgctttgagacttcggtagggctattcggccagtgctgcggcgtacttgccaccggacttcttctgttaaaggtggtggatcctgattttcagacgaatgcggcaaccaatatcacttcctccagcacattgggctatacgtaccagctccagtatacgctggtgtttatcgcgctgattatgacgcagccgatgtttgtctatctgtggagctggggacttatgctgatactcctgggagccggaatgtttttcgggaaaaagtaccgtaaaaaagcagtttaatcatatataaataaagtttagaaagaggtaaaaatgaaaaatacgaattggatgaaagagatgagctggacggaatttgcagagagaaagttatcctgcgacacggtgattatcccgggcggggcgatagaggtctacggaccgcagctgccgcttggttccgattccattgtgtcaaaggcaatctgcgagatggtggcggaaaaaacgaatgcgatgatagggccgtttattgaagtggggaatcagccgcactgtacggttttccgggaacaatcaagattatgccgcagacctactatctgatgatgcgcgatgtgatggaatcattaattcactggggatttaagaatttcatgtttattaatatgcatgccggaaatgtgcccatcatcgggcagctctgccgtgaataccagcgttcctccggtatcaaatgcgcccagattgactggtggagatttacgcagccgaattccgtgggaatctgtgaaaatacgggatggatggcccacggacatgccagtgaatgcggaacttcagttatgctttacctgcatcctgaatacgtggatctcacgaagacagagtgtatcagaatgccggaggagtatacaaaatacccggatattattacatacacggaattcagggacaaaacgccgaacggcatcctcggggatgcaacgattggaagcagggaaaaaggtgaggcaattgtcaggaaatgcgtggataagattgccgcctttatgatgagcgagttcaacagttagtcagcataattgaaggcggtgacctgcgcgcggagcgtgccggttatcgttctggctttagccagttgaaggcattggagtttttcgtgttccgaaaaatgataatgcctgaaacaggaaaccacctgctttgcgggtggtgcagcaagtgcttatagcacaaaaatcacctttccgatagaatagagttgttcaagctactatctaagaaaggaaaggtgattttaatggcacacaagaaacatgatatggcacatacaaagtggatgtgcaaataccacattgtgttcactcctaagtatagacgaaaaatgatttataatcaatataaagaaagcatacgagatatattaaaaacgttatgcggatataagggagtggaaatactggagggtcacttaatgccagatcatattcatatgctggtaagtattccaccgaaatacagtatatccagctttatgggatacttaaagggaaaaagtgcgctgatgatatttgataagcacgcaaatctaaagtataaatacggaaatcgtcacttctgggcagaaggttattatgtcagtacagtaggtctaaatgaggcaacagttaggaagtacattcaggaacaggagaagtatgatatagcaatggataaactgagtgtaaaggaatatgaggacccctttaaggggtagccggtattacaaacgccctttaaagggggcgacgagtcaagggcatagtggcttgaacagagtgaaagccagcgtctttaggcgctggccggtaactgtccccttataggggcgagcaaaccacccgtttgacgggtggtcatgatttaagaaggagaaagcttatgaagaaatttacagccgcagtcattcagatggattccgggaatgacgtggatcaaaatctgaaggaactggaaagatttattgaggaagcagcggaaaaaaacgcaaagctgattgcaatgcctgaaaatgtcaattatgtcggagatgaaagcgcgaaatatgcggaagatgttccgggaggcaaaacattttgttttctgtcggagctggcagtgaaatatggggtctggcttcactgcggcagcatctatgaaaaaaatccggcagacagccggccttataattgcacgatggtaatcgggccggacggtgagttaaaagcgaagtatcataaaatgcacccatttgacgtggaaattaaaaatggaccggcagtcagggaatcggaacggatctgtccgggaaatgagattgtgaccgttgacacgaatgaggtgggacattggggctttctatctgctacgatatgcgttttggagaattataccgtctcatggctcttgagggggcggagattttatttgtaccggcagatttcacattaaatacgggtaaggatcactgggaaaccattctgcgcacaagggcaatcgaaaacggctgctacgtgatagccccgggacagtatggaatcaaaccgaaattccaggcatatgcgaagtcactcgtggtagatccatggggcaatgtaattgcaaaagcgtcggatcagccctgtgtcattactgcggagatcgatcttgattatcttgaaagagtacgcagacaagtatttactctggaaaacaggagaggggacgtctatcagctgcgcagaatgccggcagagtgagagagaggatgaaaaaaggtttttcgctcgtaatattatcagccgtcctgtttgggacaatgcccttttttgcaaagcagatatatgggatgggaggcaattcccttacactttgctttcaccggttttgcctcagtatcccgttcctctatctgattgtccgttacaaatataaaatcagcctgaaaattacaggaagagagttcaggaaaatactggttctgtcactttgctgcgcaggaacgccgctgctgctgtttcagtcctaccggtacattccgtccgggatggcgacgacaatccattttgtatacccgattctggtgctgctcggctgcgttgtcttttaccgggagaggctcacggtaaaaaagtcggtctgcgcggcgctgtgcctgcttggtattttgttcttctacactccggggagtccgggagcccggccggagtggccctggcctttgcttcgggtgttacctatgccctttatgtcctgtactactccaaaagcggccttgcagaaatgaacacgtttaagctgagtttttatctgtccctggtaagctcagccggcatattggccggggcggttctgtcgggaaagatcgtatatgagatgccgcctcaggcgtggcttctatccgtactgttcgcttttatcgtcagcgtggttgccacggtttcattccaggcggggacggcccggatcggaccggagaaatcctccatgcttagtacatttgagcccctgaccagcatagcggcaggagtagtcctgttcagtgaaccggtgacgccccgaactgccttcgggattgcctgtatcctgtgcgccgtgattttgctggcgtacggggacagaagctcaaataagcttacatttaccgatgaaacagtccattgagaataaggtaacagctcattgagaataagcttttgacttattaaatatgcaatgttagaattgttaataaaggagcgggtaaagatggcagattttattaacagagtgacggagcattttgatgagctgacgaaatctcacaaagaggttgcgaattattttttatataatctggataaagttgcggtgggtacgctggaagatctggccggtctggtgggggtcagcaccacgacggtaatccgttttgccaggcagcttggctactccggatttacggagcttcagaaggatgcgcagaatattgtattaaataaagatatgatcccggaacagccggagagtggttccccggaccagaaggtgagcagcaggctggccacatcttttgaacgggatatccgcaatattgaaaacacgatgaaggatctgaaagaggaagatctggatcgcgccgtgtctctcatgcagtcggcagattccctgtatattatgagcatgaggatgggtttttcactggcatactacgcttttgcaagctggggcaggctaagaagagatatccggctcctgcgttttacgggtatggagtacccggaagagatggtcagcatgaaaaagggggacgtatgcgtcgtctttgcattcccacggttcacctcccttgcaatccatcttctcgaatggatgaagaagaggcaggtaaaggttatcctggttacgtcggccacgtttgtggcggccagggagtatgctgaaatcatactgccatgccgggtgcggactgcgtcttaccagaattcccatgttgcgccgatttgcctgatcaattattttacaatggcgctgacggcggaaaattatgatgaggcggcggagctgctgcgggatacggaggagcttctcgggcctggcttttacatcggaaattaaacagaaaaagaaagccaaagagagcggaaaaagaccggtgattgctttttccgctctcttttacattgatgacggtgacctgtgcgcggagcgtacaggttaatgtctgcgtccggtcaaaagaacagatgctcaattaaaatattggctgccatcagaatcaggatgataccgccggcacgctccgctttggatttatatttcattccgaaaagattgcctgctttgacgccggccaccgagagaataaatgtggtgacgccgataaaagaaacggcagggataatattaacgcttaagaatgccagagtgacgccgacggccagggcatcaatgctggtggcaacggcgagaatggtcatggtcttaaaatccacggaaggatccagctcctccgattcgcaggaggcgaaggactctttaatcatattgattccgatgatgaccagcaggacaaatgcgatccagtgatcgacggaagtgatggcctccttaaaatgatagccgagaaaataaccgatgagcggcattccggcctgaaaacctccgaaatacagaccaatgataactgcatgctttttattcaggcgcttcattgacaggcccttacagacggcaacggcgaaggcatccatcgaaagccccaccgcaagaataaataattctactaatgacataggagttccccctgttcgtatattgatatgcaagagagcggctgtctcatgcgaaactttggcggtttgcaacagcccatgctgtctgaactgttacggcggtttgcatgaaaaacagatgcagtacggtctgaacaacgaaaaaagacttatctgcagcagaaactgcagataagtctcatcatttaaagttaaaccagatatttctatcagtatgttggctaaactacacggatgcgctgactactcccttatctttgtatgattctatcggaagtgagaaaaaaagtcaacattaacttacattttcccgcaaaaaaattacccgttttttacattagctatacagaaatatgatttcccctttttctcaaatgccttatactgcgaactgtaataacaagatttgaataagtcaattgaaagattgaaggagaaaagagggtaattatgaaaaaaagaattcagaaatcaatcgcagttttaggtgcggcagtattaacaatgggccttgcaggatgcagctcatcttccaatacaccggcgtcatctgctccggcagccgatacggcagaagctcccgcggcagacgtacaggcagagtctgcagccgatacgcaggcggcagaggcagcggccggtttgagcggttccatcacgctggccggttccacttccatggaaaaatttgcaaatgccctggcagaggcatttatggagaaatatccggacgtaacggtacaggccgaattcaccggttcttccgcaggcgttgaggcggttctgggcggacagagtgatgtcggaaactcttccagaaaattaaaagatgaagaaaaagaaaagggagctgttgaaaatatcgtggcaatcgacgggattgcggtagtgaccgacccggccaatacggcggcagatctcacaaaagaacagttgattaacatttataacggaaccatcacaaactggaaagatgcaggcggatccgaccagccaatcgtggtaatcggccgtgaggcaggttccggtacaagaggcgcctttgaggaaatcctcaaattggaggatgcatgtaaatatgccaatgagcttgattccaccggagccgttatggctaaggtagcgtccacgccgggagctatcggctatgtatctctcgatgtcattgatgatacggtcaaacttttaactctgaacggagtggaagcgaatgaggaaaatattaagacaggcgactatttcttaagccgtccgttcgttatggcgacaaacggagaaatcagtgcacagaacgatttggtaaaagcattatttgattatgtgtactctgctgagggggatgagcttgtcaaatccgtaggccttatcactacaaaatagtaaaaaaccgcaacagctcagacgcctgaactgttacaaatatccggccgctgcaactgagagcaggaaagcttgaaaggcgaagcttcacacttggtgcagcggccgtagtttattctcatccgttacttagaaggagaaacatatgcacgagaaaaacttttccatagcccgtaatcataagaacaaaacggcggtagaaaaaggagctgaggtcatttttacggcctgcggcctgctggcggttattgcagtcttttcgattaccttatacatgattatcagcggtactccggcgctctttaaagtggggatcctcgatatcctcttcggaagtgtatggaagccaacagcggatccggcttccttcggcatcctttatgtaattctcacatccattgtcggtacattcctggcaattctaatcggagttcccattggcgtgttgaccgctatcttccttgcggaggtggctccgcccagggttgcttcgattgtaaggccggccgtggaactgctggccggcattccgtcggttatctacggccttctgggaattttgattctgaacccgctgatgtataaactggagctgaaaatatttgcaggttccaccacccaccagtttacgggaggcgccaacctgatttcagcagtgcttgtgctggcagtcatgattcttccgacggtaattaatatcagcgagtcggctctaagggcagtgccgaagcatttaaaaagcgcatcgctggcgctgggagctacccatattcagactatttttaaggtgcttgttccggcagccaaatcaggaattgtaacggcaatcgtgcttggctgcggcagggcaatcggagaagcgatggctatcagccttgtgtcgggaagttccgttaaccttccgcttccatttaattccgtccgtttcctgacgacagcgattgtggcggaaatgtcgtattcccagggacttcaccgggaagtgctgttcaccgtcggcctggttctgttcgcatttatcatgtttatcaatacggtgcttacccggatgttccagaaaggaggggcggaagatgactagtaatttaagtatttacaacagaaaagtccgcacctcggatcaggtgcttaaagggcttatctatctcgcggcggccgcagcaatcagccttcttgtggggattatgggatatgtgtttataagagggcttccgcagctttcctggcagttcctttccactgtccagagcgccagaaaaggcaccttcggtatcctgggcaatatcgtcaatactttgtatatcattgtcatcacactgattatcgccgctcccgtggggattggctcggcgatatatctgaacgagtatgcaaagccgggcaggctggtgcggacgattgaatttacaactgagattttatcaggaatcccttccatcatattcggcctgttcggaatggtgtttttcggcactacgctgaagttgggatattctgtattgaccggttcatttacattgactctgatggttcttccactgattacgagaagcactcaggaggcgcttaagacggtgccggacagctaccgcttcggagcgctaggcatcggcgccaccaaatggtatatgataaggacgatccttcttcccagcgctgcgcctggaattcttacgggaatcatcctgtcgattggacgtatcgtgggtgagtccgcagcgcttttatttacggcgggaagcggattccagctgccaaagagtctgttcggcaagctgtttgaatccagcggcacactgacaattcagttgtatctgtctatgcagaaggcaaagtatgaccaggcgttcggtattgcggtggtacttctaatcattgttctgggcatcaacctgctgacaaagtatctgaccaggaaatttgatgttacaaggcttcaataaacggaggaagagatggaaactacgggaactttggaaaataaaattgtcacaacggatttgaatctgcattacggtacaaatcacgcgcttaaagatattaatctcgatatttatacaaataaaataactgccttcatcggaccatccggctgcggaaaatccacatatttaaaaacgctgaacagaatgaacgatctggtagacggtgtgaaaatcgagggaaaggtgatgatagacggggaagatatttacgatccgagggtggatacgacgcttctcagaaaaaaagtggggatggtatttcagcagcccaatccatttccgatgagcatctatgacaatattgcctatggaccgcgaatccacgggattaagaataaaaaccagctcgatgatattgtcgagcgaagtttaaaaggagcggcgctctgggatgaggtgagtgaccggctgaaaaagtcggctctgggcctttcgggagggcagcagcagcgtctctgcatcgccagggcgctggcagtggagccggaaatccttttgatggatgaacctacatcggccctggatccgatttccacattgaagatagaagatttgatggatgaactgaaacagaaatacacggtggttatcgttacccataatatgcagcaggcaacccgtattgcggattataccgcattcttcctggtgggagaaatcattgagtatgccccgaccacggacttgttttcacatccgaaagagaagaagacagaggattatatcacgggccgtttcggctgatgaagatattttgaaacaagtatttactgtaattattaggaggaaatgagatggcgccgagaataatgtttgaccatgagcttatggagttaaataacgaactggtaaaaatgagtgagatggttgaaaaagcgattgcagacagctttgaagcattgaataaaagggattactcccttgcaaagacagtgattaagggggaccgtaatgtggatgagatggagcgtaagatagagagccgctgtctctcactgatgctcaggcagcagccggttgcccgtgacctcagacatatttcaacggctctcaaggtagtgacggatctggaacggattggcgaccatgcggccgatattgcggagctgacgattcagatgaaagataactgttcctttgagaacgtcaaacatcttcctgccatggtggaaaatgtaagctccatgctgcgggatgcaattcaggcatttatcgaacgcgatacggaggctgctgaacagatagaactgcgggatgacatcatcgacgctttatttgataaagtaaaagacgaggtggtggagctgcttaagtcggattcttcccagtcggatatggcggtggatctgctgatgcttgccaagtatttggagcggataggggatcacgcggttaatgtgtgcgagtggaccgaattttcagatacgggggcggtgaacagcgtcacgttattataatcaggctggaggcttaaacagatgcgggcggaatatgacaggcagctcagggagcttgaagaggaactgttcgacatgggaagtatgtgccagcaggcagttgccttttcaggagctgtgctgattggggatgatgaaacattgagggaacaggtctgctcactggagatggagattgacaaaaaggacagacagattgaaaacatctgtaccgggctgctgcttcgccagaccccggtggccggggacctcagattcgtctcagcagccctgaagattgtgtccgatatggagaggataggcgatcaggccgccgatatcgcagagctttcccggtatatatccgaaaaaccgcttctggaaaaggtccatatatccgatatctgctgtgttgtcatgaatatggtgacggacagtgtcgaagcccttgtaaaaaaggatgaaatactggccaggaaagtgatcggagacgacgacattgcggatgagctctttgtcaggataaaagaagagcttgtgagcctgattcaggaaaacaggacagagccgcaggaaattctggatcttctgatggcggcgaaatatttcgagcgggtgggcgatcacgccgtaaatatagcagagtgggtggaattcatcgtgaccggcatgcacgacgacagagaatgcgggcattaattgttactattcaaatcggtctgtcaagacagttaaacaggattcacatcggtattttgatgtgaatcctgtttctttcaattattcaatagcaatatatttcttttcttcaaccgctttgcgctgctcctctttcgggaataccagcttcagcatgccgttttcaaaggaagcgcgtatgtcttcttctttcaggttatcaccgatatggaaacttctgcggcagcttccgctgtagcgttctctgcggatatatttgccgtcctcatccttttcctcgttctcagaggacttctgtgccgtaatggtaaggtatccgcctgaaagttccgcatgaatatcttctttggcaaagcccggaagctcgatgtcaagctggtaattctcacccagatcctgaatatcggttttcataacattggatacggagcggctgccggaggtgaatccggggaaccggaacatgtcgtcaaaaaagttgtctacaaaattatcattgaaaatacttggtactaacataattcattcctccttatataaaaagttgattgttggtattggattacagatgattttctatttgttctatatgtaatataacatacaatattagcactgtcaagaggcgagtgctaatattttttaaattttttcggacgcggccggaacggaccatgtacggtgtgatgaggggggctggctgagtcttccgtccccgtgggaggttgtcgtgaagggggaatccggccggaatgaattgctgcggggaccgtttgcactctttggagtgcgcatcagtgctaagctcgtgaggaacctcgctaagcaccggcggactcccaggtcccctccgcaattgattccgcctacttccccggtccaggttttctccggggacggaagactcaggcggaggttttcgcacaccggacatggtccgttacggccgctgattctctctaaccttaaatggggagggccctgtcgcggccactacgtgttaccgcaggcagatatcaaatctagcgcaattctttcatcaaggcgcattgtaggcatatcgtatttcccgcacacggtagcactgagtggccgcgacaaggtccgccccgcacttaacgcgtgagacaatcagcggccgcaggccagtggacggggccgatacacccggcggagtctttcgtcccggcgaaaacctggccttgggcggaggagaagataaagtctgcggatgccgctgaaatccatcgctgattagcgaggtcccttacgagcttagcagcgcgatgcatttcacagagcgggagcgtgctccgcagactttatcttctcccgcagccccaactcacaacaatcttccccggggacggaagactcatatacacaccccaccaccccgtccgctgaccgtaccggcggcgtcctcgcctgcttaactaaatagttacccgcaccaattttaattaaaaaagagtcaagggaggaaaagtgattgccaaatgcaggaaagagcatatataatatagaggacaggaagcggcacaaccggccgtattcctacagggaaacgaaggatggtacaggctatggaaagaggatttacactttcacagaatatcgcggataagataaaaactaagattatgacaggtgaatttgcattgggatccaagcttcccaacgagaatgagctgatggatgatttgaatgtgagccggactacgataagggaagcagtaaagatactgatatccaaaaacatcctctatatcgagcgggggaagggaacttatgttgccgccataccggggcttgcggatgatccctatgggtttgagtttataccggaggaaaagctgattccggatctctgtgaaacgagaagcgtaatcgagccggaggtctgttatctggccgcacaacgggcgacgaaaagacagcttagtgagatggaggcaattctcagaaagatgaatgagatcatgtatgagctgaaaatggatgagagcgatcagcgcatgatcgatcagctggcagactgtgagatggaattccactccctggtctactgtatgaccggaaacatagtgattgagaggatgcttcccacaattaaaaaggccattgcactgaactatacgacgaatgtataccgccgttcctttgagcttaccgtaactcagaatcttcatattgatttgtttcatgccctccaggccggtgatgccgacagagcgcgggagataggcagggagcatatgaaaacgatgcaggaaaaaacagggcagaggagataaacagatgcaaaattaatctgattttgttattgacagaggtatgacgtcgtgttacactgaaattaccaaattatgtgtaatttcagtgtattttttttattatataacatcatacgtcataccacttaaagaggcagcattctccatagaagggaattgtgatatggggctgagaagatgtctgtttcaaataaaaaggaggaagaaagatgaaaagattcgtagcattaacagtggccggggcgctgacacttgcttcgttggcggggtgccagaaagcaagtacggcagagaagcagccggcagggggagaaacgacagagagccaggcagaaaatggggggaatgagaaaaagagtacggacgcgaagctgttaaaaaccagcatgccgacagcctgggatgagacacatggttatacccaggcgttgatcgccatgaatgcatatcttgacgaggcctcaggaggcaggctccagctggatatctatgctggcggtcagttaggggacgaggtgtcggtattcgagagtatgcagatgggaacgatagactgcgccgtattcaatgcagcctccctgtctaattttacgcatgtgctggaggcctttgatttgccctatatgtgggtggatgataccggcgtggtcaatacaaaactgcaaaatactgtggtcagctcagattttgcaaagggataccttgataaggtatacgctgagacttcggtaaagccggttggctttttgtataatgcatcacgtgatttcttcctgaaaaaagagttgaagagtctggccgatgcccgagtatcaagctccgctccatgacggcgcagatgcatcttgatatgtataccgctatggggtttgtggcaacgcctttgggatacagtgaggtatataatgccatgcagacaggcgttgtggacggttttgaagatacggcatgttccaccattacctcaggaacctacgaaacggcaaaatacgttgtcaaatccggtcatgcgaccgcttcccctctgtttgtgtgcagcggcataacatgggacggactgtcgcaggaggaaaaagactggctgacggaggcggtcgaaaagggacgtcaggcctgctatgatacttttgaaactgcgcaggaaaatgcatacaaaacatttgaagaaaagggacttcaggtgtctgtcatcgatcatgatgccgctgtggcagcgtgccggccggtaattgacaagtattgtgaaaatgaagacagtaaagcaatttatgattatgttatgaaagtacgtgaagagcttggaatcccgaataactaagcaggatcatgtttgtaaaatgttctggaaaggctgctttgacagtgcggcgcttctcccgcctgtctgtgccggcccttgctgcttactatttttggaaatggagaaagtatggcaaaaaaagtgatttatatgctggatcgttttaacgatcgcctgatatgggcggtcaaatattttctttgcgcagttttgacacttcaggtatgcctgatctttgtctccgtggtgatgcggtattttctcaaccgtcctctttcatggagtgatgagatggcgacatttatgctggtgtatgtgacgtttctgggaacctacgtggcatccaacaccggtcatctggcgaaagttgagctttttatttccctgtttaaagggccgctccatacggctgccaaaattctgtcacgtattttttccgcaggcttggttggctggatcggattttacggaacgaaaatgtatttttccaacattattcagaaccaggtcagttccgccatgcagattccgatgcggtttgtctggtggatcctgccggtgacaatgtggctgctgcttttttcggaagtgctgggatttctgcatatatttattcccagaagtgacggaaatgaatatgcgcggctggattagagaggggtgacggtatgataatgataattatgtttgtggtcactctgcttctgggtgttccgattgcatatgtactggggctggtaggtgcggccgggctgattaccatgggaccgaattattttccggcggtggcgcagaaattgttttcctccgccaattcttataaccttatggcgattccgatgtttatcctggccggggaactgatggggctttccggggacgtgacacgtctgatggacttctgccgggcgcttgtggggagggtgaaaggcggcattgcctatgtctgcacgattgtgggactgcttcttggaggaattctcggcatggccaatgcggaggcggcccttctttcctcaaccatttatccggaaatgagaaaggacggatatgaagatgactttgcagcctgttttattgcctccgtatcggtggtcggtccgcttatcccgccggggctcctgtatgtgatttatggtgtttccagcggtacaccgattgcctatctgttcgaggcaggcgtggtgcccggaattatggtcggtctggctctggctctggtgatttttatcctgtcgaggaatccgggccgcaaatgggtgattcacgactggcagggctggaggcatgtatggagtaagcttaaatcagccgctttttcaattgtggcgccttttttaacctttgtcagcatcgcggcgggagtagcgacggcgacggaatcggcgtcgctgattattatggtggtgacgctcgtcggaatctttatctacaaaaagattaaactgaaagctttaattccgatgataatccggtcggccgtaatgagcggagcgatactgattatcgcagcgatggcaggtgttatgggctgggcactggcgatagaacagatacccacaatcatctgtaatttcatgctttccctgaccgataacggactgattgccatgctgctcatacaggttttcctgctgatggtcgggatgtttatggacgcatcaccggcagttttaattctggtgccggtgttcctgccaatcatgcaggcatacggctatgattttgttcatttcggcctgctgatgtgctttaacctgaccatcggtgttctcacgccgccggtcggcacctgcctttacacgacggcaatggccacaaaggtgccggtggatcggatggtaaaaggaatctggccatggattggcgttcttgtggtatgtcttttaatatgcacctactgcccggatctggtattggcaatcccgcgcctgttgggttatacaggttaatataaatatgaacggaggtttaatatgattcaaaacaatgcgaaaatcaatgacaccttatcgaaggaaatcagaaaggcgaatgagaccagagggatgtggtattaccagctggtgaaggcagccgggcggtacggtctggatgaggaggcctatgcccgcagcgctatccgcaaattagggaatctctaccgaaagaattatcctgatacggacagcatttcccagtttatgggcgcgttcatgaatgatcagacgataaagcaattccatgcggaactggtctcgatgacggatgaagaggccattgtccatttccattactgcccgatgtgcggggcttggacaaagctcaccgaggatgaaaaggaaatcggcttaatctgcgactgtgcgatggatgtggaccgcggcgtatttgatttgtatgatcatatcggtttcaagctagagcgcgcgatcggaatgggagacggcgtctgtgagcttcattttgtaaaaaagtaagggggaagtaagatgataaagaatgaaccgaaaaaatatgtgggtgactataatgtggatgcagtgcgggatgcctatgaaaaccggggaagatggtattattttctcgtgaaggagggacttgagcagggacttccctggagtttgccagggatgccatgcatgaggcaggattattcctcgggaaaagcaggtttaacggaattgacaatctgaaggattttgcggacgagtttatgacctatggggttgaaaaggtcaacgaaggagaagttgtgaagctttcggaggaagaatttgaggtggatttggggtattgtccgctggtcaacgcctggcaaaagcttgagcaggatgaaaaatttctggcggatatctgtgacatctgtatggagatggatcgcggcatcgcggagagccttggtatgtccatggacttaaaggccacgattgcatcaggctgcgggaaatgtaccatgtgttttaagaaataagaccatgaaggagcggcggaaaagatgaaagcattgcttgaatggatcaggaaagacatgaaaccggctcttggggtaacggaacctgctgccatagctctggcctgtgcggccgccagagctatgacggaggaaccggcagaatgtcttctggtgagagaaaattccggtatctataaaaatgcatttacctgtggaatccctggcacggataagattgggaatgaatatgcggctgccttgggctgtgtggcgggagataaggaaaaaggccttctggtgctggaggagatatcagatgcagatgtggaagccgcaaagcggtttatcgaagacggaaaggtgaaggtagaagtctcacagatcagctctgaattgtttatttatgcatgtgtccggacggagcatgactgctgtgaagctgagatcaggggacagcatacgaatatatgccggcttgtaaaaaacggacgggtgcttctggaaaaaaagacccgggagctggaagaaacggcccggccgggttcgcttacggactatacaatggaagagttcttcaggtttgcgaaagagaccccggtcgaggacctttattttatcagggaggcgtacagggtgaacctggagcttgctaaagcagcgctcacctccgagcggtgtacgctgactaaaagtcttctggcctttaacggggggacggatgtttccggcgatttaagagcgacagcccgtttctttgcaggagcggcctctgaagcgcgggttctgggccttgataagccggcgatgagcattacaggaagcggaaatcatgggatcatctgtacgatgcctttgtatgcaatgtaccgggtggaacaccattccgaggaaagcctgctgcgggctacggttttgagctatctgattacaatgtatatgaaggaatactccgggaaactatctgctttctgcggatgtgcagttgcagccggaacgggaatggcctgcgctatgacgtttatgagaggaggcggtttcgaagaggttctggcgacacttaacaatatggcggcatccattgtgggaatgatctgtaccggaggcaatcatgcctgctgtatgaaggttctggcggcagtggatacggctgtgacatcgacggaactggcactgtcaggaaaatgcatctccccggagcatggcgtggcggatgtatgtccggagaaaacaatgcagaatatcggactgatagcgtatccgggcatgacagagacggaacgtgtaattttagaaataatgcagaataagaaggggggagccaaaggacatgaagaaactgattaataatccggaccgggtagtcacagagatgctgcagggactgtgtgaggcagaaccggagcttgtctatgccggggaaggaatcgaggttgtcagcagaagggaaaaaacaccgggcaaggtaggcctggtcagcggaggcggcagcggtcatgagccggcacatgccggctatgtgggaaaaggaatgctggatgcagcggtggccgggaatgttttcgcatcgccaagccccgaccggattctggaaggaattcatgcggcggacggcggagccggtgtccttctgattataaaaaattattcgggtgatataatgaacttccagatggcggcagagctggcgcagatggagggcatccggacagaatgcgtggtggtgaaggacgacgttgcggttccggacagcacctattctgccgggcgccggggaatagccgggactgtgctggttcacaaaattgccggagcagccgcagagtcgggaaagaatctggacgaggtcaaaaggattgccgaaaaggtgattgtaaatctccggtcaatggggatggcgatgtcgccctgtatcctgccggcggtgggaaaaccgggcttttccctgggagagacagaggtggaaatcggcatgggcatccacggggaaccgggaatctgccgggaggacctgacaccggccgcagagacggcaaagacgcttctgtcccggattctggaggattttgactacagcaaaagtgagacggccatgctggtgaacggtctcggaggaacgccgcttatggaactgtatataatgagccgggagcttacacggatcctcagggaaaaaggcattaccgcagtccgcaccatagtgggaaattatatgacatcacttgagatggccggctgttcggtcacacttttgaagctggatgaggaactgaaggcgcttctggcggcgccggccgatacaccggcttttaaatgctgagacgggagggcggaaagatgattataacatcggatgattatgtggcttacctgaaccgggcggcggcggtaatacgcgacagcaaggattatatcagcggcctggacgcggcaacaggggacggggatcactgggcaaaccttaatctgggttttgaggcgatcattctggccggggaaaaattaaggaaacttccaatagatgaagtgttcaaacagattggcatgctgatgatgagccgggttggaggaagctcgggcattctttacggaggcgcgtacctggcggcggctaaagctgtggcggggagggaatcactggatgcaaaagggctctgtctggcgctctcggccatggtggaggatatgatgagccgcggaaaagcggagccgggatttaagaccatgatcgattccctgtatccggccgtggaggcattcaggcttgcactggatgcaggggaaaatgacaggacggtacttgagcgtgtcaaaaatgcagcaaaagacggggcagagagtacgaggcagatggaagccagaaaaggccgggccagctatatgctttcaaaaggacaggggcatctggatccggggcggtcaccatgtcctaccagctctgttgtctttgtgactatttgacggaacggtaagaaaagctttgcggcgtgtcatacacagtcttttgaaaaaatcccgagtcatacattatttaagcgctgtataaattatagtaacacgttttatgcaggtgcggccatgcagcagtttatagtggaagtgatgaattcattcggatacatcgggatatttttactgattctggtagaaaatctgtttcctccgatcccctcggaggtgattctgacatttggcggttttatgactacttatacggcaatgaatgttcccggcgttattgcggcatcgacggcaggctcggtgttcggagccgtgattctttattatgccggccgtctgataccgaaggatgtcctgaaaaatttgctggaaggaaaagttggaaaacgccttcattttgaaacggaggatgtacacgacgcggagggctggtttgacaacaaggggaaaagcactgttttcttctgccgctgcgtaccgattatcagaagtctgatatcgataccggccggcatggccaggatgaagatggttccgttcctgatcctgacttttgccgggagccttgtgtggaatacggttctggtgacggccggagccgccgccggcgcgtcctgggggaagattctggatgtgctgaatacatattctaatattacggtgattgttgtggggattgccgcactgattggcagtacggtttatttcagcagaaggaaagaagaggagcattagtctgaaccaatgttatttagttaggcaggtgaggacgccgccggtacggccagcggacggggtggtggggtggttttatgagtctttcgtcccgggggaagattatcgtggtttggggctgcaggggaagataaagtctgcggagcacgctcccgctctgtgaaatgcatcacgctgctaagctcgacaggacctcgctaatcagcgatggatttaggcggcatccgcagactttatcttcccctccgccccaaggtcagggtttcgccgggacgaaagactccgccggaggggattggccccgtccactggcctgcggccgctgaatgtctcatgcgttaagtgcggagggcggaccttgccgcggccactcagtgcttccctgtgcgggaaatacgatatgcctacaatgcgcctttatgaaagagctgcgctagatttgatatctgcttgcggaaacacgtagtggccgcgacaaggccctctccatttaaggttagagacaatcagcgcccggaacggaccatgtccggtgccacgaaaacatccgcctgagtcttccgtccctggcgaaaatctgccccggggaagtaggcggaatcaattgcggaggggacatgggagtccgccggtgcttagcgaggttcctcacgagcttagcactgttgcgcactccaaagagtgcaaacggtccccgcagcaattcattccggccggattcccccctcacgacaacctccaaccggggacggaagactcagccatccccctcaccacgccggacatggtccgtttcggacgcgtcctccacacctcagttaaatctccaatcatgatgactcggggaataaaccgcgcaaaattgggaacgtttttaatatggaaaaattagatcccagattggcggcaatcatatttttgttatatatacggtatcttccaggtatgctgtgggagagaatgagagttttgcataatcgcgataaaaagaaagataatgaggacagcggtaatttttttgatggaagacggtaatcggtgtgcggagcgtgcaggttaccgttaaagtctgtcaatggttatataataatttgtataactcttttcaatttaagcaggaatgtggatgaatcctgagccttcctgtataattttcctatatggaccggtatgccgcgggcagtccggctggcgggaaaacgatacgttttctacgaataaaagcggagggtacaggaatgaattcatttgaaaatgcggtaaatgctacatacttgattgtccggtgcggtaagcagcggtacggaatacctctaaaaaacgttgtgcatgtcatcccggtgcagaaaatcagaaaagcgccggagctgccggcttatgtgcttggaaaaacaattcatgagggagcttccgtcccggtaattgacttacggctcaggatgaatgttgaggcggcgccgtttgacgatgatacctgcattgtgattctgcatgtacagggggaaaatgcaggtctgcttgtagattcgtcagaagatatacgggagcttacaaaaaaagataagggcccggaggaagtgtccggttccggactgatactctgtaattatctcaaagagggagtggagattgcagttctcgatgtgaagaaggcaatcgagatgtaatagtgcgtttgagtaacagttcagccatgatgtattccgcgaggtgttttcgttgttttttgcgaaaatcccgagttgtgcggcgcgaaacggcgttattttgccgtttctgtgcatcatttgttacggtttagccgaaggctgaactgtaacgtgtttgaagattgaataagggattttattgacaagcggatgggcaggaattatagttggattaagttgcattcggataagaacatttggaatgtttttatccgattatcagaatccattttcagaaaagagactgccatgaatcataacactcaaattaacacccgaatcaaactcgaaaatattgtcattctttttattgtgctggcatcgctggctctgctgattctaagttttctgccctccctgccggtctcggcggctgtacgcgtttcccttgagatgggaaaaatggtgcagagggccttttccattgtccttcttgcagtatccctgcagctgatgaagcgcaggaggacggcgtggtacataaccatattcatactgcttttaaattttatccgaggcttttccgagttccgccatccggcccgtcttgtgattatggccgtcgatttggttctgcttatcatatttgtctgtttcagggaggatttctgctgtccttcctcaaagcgctcgaaaaaggcggccgccgtgtttctgctcctgtccctggcaggcattgcagccaatgcggggcttagctatcattatatgaaattgggatctccggataacgcaggttccctctgggacagcctggtgagcggtaccggaatgatttttggaatgggagacggtctgcagggaatgtacggcaaaacaaaatatgagatggcaattttctggttcagttggggatgcatcctggcggccgtcacctatgcggccaaaccgtggttccagtcacgcagaagcggaaaatcagatatccagcatgccaggacacttcttagcctgtacagccagaatccctgttcctatctggctttggaggatgataaatatctttacttcggctccgggagggatggcgtgatcccatatggtacggttggggagacggtcatcgtgaacggggatcccgtatgcgcagatgaagacttccctgctcttttagaagaatttaaggagttctgccaaaagagcgcccataagctgttctttctcagcgtaacggaccattttctggaggaatacaggaaacagggatttggctgcgtaaaatgcggtgaggaagccagattccggctttccgaatatgagctgagcggaaaaaagggcgcaaagatgcgcatgaatcttaaccacgccgcaaaagccggtgttacggtacaggaatacagggtgctggaacagagggatccggtaattgaacaggaatttgagcggattacacaggaatggctgcaggagaagaaaagctccctgctgaaatttacgctggggtcggtgggtcttgatgagcccatggataagcggtatttttatgcattggatgcttccgggaagatggctgcctttattgtatttgtcccgtttttaggaaaaaaaggatatatggcagatgtgacaagacatggaaaagaggcgcccggcggtgtgatggaaacaatcatctatcaggcatttcagattttttgccaggagggtgtggaatacggcagcctgggagtggcgccgctggccgggcttgaggagaacagttccaacatggtggagaggctgctgcggttcgtatacgatcacctgaatgactgttatggtttccgggatttatacagggccaaggaaaagtacagtcccaccgaatgggttccttcctattacgtatatcttccaaggattccgactccggatatgttctatgcggtggcaagaatacagaatccccgtgggatgtgggattacgccgttgcgttcgtgaaggggaggtttaagaaaaaagaggcacatcaatgagcaaggttatttagaaaattttcatataatgcaaaacctgaagtgatttccccggcggaagcgttttaaggagtgagggagaaggaagaggcgggcagaaggaaaggagagctttatatgggatgtctgggcaatatattatggtttcttttcggcggcgccatcagcggcttaagctggtgtctgacgggctgcctctggtgcattacgatcgtcgggattccggtaggcgtgcagtgttttaagctggcatcactcagcttctttcccttcgggaaggaagtgatctacggcggaggcgccggctcactcatattgaatattatctggcttgtggtgtcgggcctgccgctggcgctggaacatcttgcaatcgggattgttttatgtgtcaccataatcgggatcccgtttgggctgcagcagtttaagctggcgaaattggctttgatgccttttgggacagagcttcattagtaaatgaaaagcaggcagattacggggcagaatcaggggcgcgtaatttaccgggataacagggatcggggcagagaaatttgctccggtccctattgcgatcctccgcggagcgtgcaggttatcgtttaacaggaaaaatttcctgttaaaaaaatgccgtaaaatcagggatttccccgttcttacggcatttctcaatatataacaataatgcgtctgataggaatcgaacctacgcctcaggctccggaggccggcgctctatccactgagctacagacgcatctccattattctactatattttatttgtcttggcaaggtcttttccataagttttattgctttttattatggattttgctagaatagagcagaacaatgcaagtgataaacacagtccggcctttactcagacagcggataaagccccggggaaacggacggataggtgatagattggatagattgctccgtgctgcggtcaaccaaacggagcggagcaaagcagataaccaagaagcagataagcagataggttcccgccccgcaggcggcggatacaggaggatacgggatgggaagaagcaggagaaagcagcccgacgggccaaagaagcctgagaactctgaccagtctgtgaaaataaacagcgcggacgagagggatacggacgagaggaacaagcctgatgccgggaagagtgcggacgccgggaagagtgcggatgcaggtaagagtgcggacgcggggaagagtgcggacgcggggaagaatgcggatgccgggaaggatgcggatgcagggaagagtgcggtagccgggaagaatgcagatgccgggaaaatggcggataccgggaaggtagttcaggaaatagaaaaaacaatagaggaaattgaccggataaggacggcttctgtttcgaggaaaaaggagaagacagagccgaacaagaaggaaacaccgattcaagctgagacgccgccgaaaacggttccggctaaagaaaagccgaggagcagaaaagcgccgaaagaacaaagtcagatatcgaagggccagagccaggtgccggagccgggggaaatgaaggcttcagcaaaagaaccggaatccgtccgccggccggaagataaagaaaagcgttccagaaggcagggacaggccgccccgcaggccaagccggagcagaataaggcgtccaggggaaaacaatctgtctcagacaatgagctgcgccgttatgtgctgctgctcagcatccctctgattgctctgatcctggtgattgtagtgctggtatcgggccggttcagggataacaccacgcagcttccggccgccaccacgaaacacggcgtggatacggtcccggaaaatgccgggataccggttatagagccggatacgaaagagtatttccatgactttggaggcagtattctgtcgcaggatacagttcccggaattaactggttaatggaacagtacttcctgtcaatctccgaatgtgatatggacacgtttttacatctgtttacttccggagataccagtgaagaggagcggtaccgccaggaatttgaaaaacagaaacagtatatagagagctaccagaacatttcctgttatacaacgccgggactggaagagaacacctacgcggcgtacgtttattatgagataaaatatgcgggagttgagactccggccccaagtcttgtccaggtctatgcggtaggcgcagatgacggcacgtataagatttatgatcagcaggtatcgccggagctttcagactatctggagcagctttccagaaatgaggacgtcagactgctgatttcccaggtggatcagcagatagaggaagcaatggcggcggaccctgccctgaatgagcgcattttatatatgaagcagggccctgactatatgcatgaggaagacaacctggagaccggagcaggagagaaccaggaaagtcagaaaactcaggaaaacagagtacaataagaatatttcataaaatagaaaaagaagaggcaataaaatggatgtaaaagatttttactatgatttaccggaggagctgatcgcccaggatccgctggaggaccgttcctcctcacgtcttctggtgcttaataagaacacgggggaaatacagcacaaagtattccgggatattctgtcgtatctgagaaaaggggactgtctggtcatcaatgacacaaaggtaattccggcccgtctgattggaagcaaagaggggaccgatgcgaaaatagaagtcctgcttttaaaacgcagggaaaatgatatctgggagacgcttgtcaaacctggaaaaaaagcaaaaatcggtacggtaatcaatttcggggaaggtcttttaaaaggcacggtggtagacgtggtagaggaaggcaacaggctgattcaattttcctacaaaggaatattcgaggagattctggacgagcttggacagatgccactgccgccatatatcacacaccagctgcaggataaaaaccgttatcagaccgtatatgcaaaacatgagggctccgcagccgccccgacggcagggctgcatttcacaaacgaacttttgggaagatcgcggaaaaagggatagagatcgcccatgtgaccctccatgtcggcctcggcaccttccgcccggtgaaagtagataatgtgctggagcatcatatgcattccgaattttatattgtggaggaagaagaggccagtaaaattaatgatacgaagaaaaaaggcgggcgtgtcatctgcgtgggaactacaagctgccggaccctggaatcagccgcaggggaggatggaatcctgaaagcgggaagcggctggaccgatatctttatttatccgggataccgttttaagattctggactgtctgattaccaacttccatctgccggaatccacgcttgtgatgctggtttccgcactggcaggccgcgaacacgtgctgaaagcctatgaggaagcaataaaggagaggtaccgtttcttcagcttcggggatgcaatgtttattgcatcaaagccggaacaagattagaacgttgggaaaagtgaacggggacatcgggaacggtgttcccgttttgacagattccgggaaggaggcagcatggatttcaagtacctgctggatacggaggaatatgattttataaggaacaatgaacgccttggccggcatgtgatcctgctggcgatgggaggaagctactcctacggtaccaacaatgcggacagtgacatcgatatccggggaatcacattaaacagaaaatcagatctgatagggatgacacagtttgagcagtatgtggatgataagaccgatacggttatttacgccttcaacaagatgatcagcctgctgctcagctgcaatccaaatacctgtgagcttctggggattgaagaggggaaatacctgtatctgaatgacataggcagagagcttataaagcgcagggggatgttcctttccaaaaaagcgattcagtccttcggcggttacgcggatcagcagcttcgcaggctccagaacgccctggccagggattcctacggtcagagcgagaaggaacgccatattttaggttccgtaaacagggccatgcatacctttaaatcgcgatatacaaggtttgaggagggcagtatccgcctgtacatcgatcagtcggagcggccggatatggatacggaaatttacatggatgcctcactgacccattatccactgagggattacaaagggctgtgggcggagatgaacaatattgtcaaggaataccaataccttggaaagcgaaacaggaagaaggatgacaatcatctgaacaagcacgcgatgcatctgctgcgcctctttatgatggctctcgatattctggaaaagggagaaatcaatacataccgcggagcggaccttccattgctgttgagcgtgcgaaacggggaataccagagggaagacggaacctaccgggatgaattctatgagattctggcagactatgagaagcgtcttgattatgccgcaaaacatacgatgctccccgacgaaccggattacagggcggtggaggaattcgtcatggaagtgaatgaaaaggtggtcagagatgaaatataaagactttgaggggacaattcaggcgctggtggacaggaagctggacgagatagaagaaatggagggggtgaaaatcctgcatgcggtcgaatcgggcagcagggcctggggctttgcctcccccgacagtgattatgatgtcaggtttgtatatgtaaggccagaacagtattatctgagactggatgagaaaaaggattttatcaactgggagctggatgagacgctggatatcaacggctgggatttatcgaagacgctgcagcatttccataaatcgaatgcgtccctgtatgagtggggcaattcaccggttgtatacaggacgacgccggaatggggggaaatcaaggcggtttcagagcgttttttttcctgcaaagccggcatgtaccactattatggaactgccagaaagaattttatcgaatatcttcagggggaggatgtgaaatataaaaaatatttctatgtccttcgtccgattctcgcctgcaaatggattgaagagcggcgctgtccgcctccggtcctgttctcggagcttatgggttcggtcctggaggaagagatgaagccggcggtggacagactgatagagctcaaggtaaaaacaccggagtcggcggccggaagaaaaatagaagagctgaatggatatattgcagaaaaactggatgaattcaaggcgaaaaccgccgcgatgccggatgacagaaaagagggctgggatgagcttaacagcctgtttatcaggatggcggggaaagccgcggacgggggagcgtttgaaaaatatgaatgacaatgcaaagacagataacgggatccgtttgaataaatatctgagcgaggcggggatctgctcccggcgggaagcggaccgcctgattgaagacgggaaagtaacggtggacggcaggacggcatccatggggatgaaagttttcacgtcacaggaaattacagtgaacggaaaaagggtggaagggaaagaacggccggttcttcttgccgttaataagccgagaggcattgtctgtaccacctcggacaaggacagggcggaaaatatcgtggaatttctcaagtatccggtccgcatttatccggtcggccgtcttgacaaagattcggagggcctgcttttgatgaccaaccagggagagctggtgaaccggatcctgaggggcagatacggccatgaaaaggaatatctcgtcacggtggaccggccggtaacggaagcttttatccgacagatgcgaaacggcgtggagattcttggtacccgcacgaaaccgtgtgaggctgagattacgggagaacgttcattttccattattctgacccagggactgaaccgccagatacggaggatgtgcgaagctctcgggtatcaggtgaaaactttgaaacgggtccgtattatgaatgtgaaactgggtaatttaaaaacaggacaataccgggagttaacgcccgcggaatgggaagaactgcagaggacactatttatctaaccgaaatcaacaaataaagcgaggcacattttatggcagaacagacttcagcaattgaaaataaaacagcaagaatccgggaactggtagatacactttcggcagcagggcgggcctattaccaggagagccgtgagataatgagcaacttcgagtatgacaggctctatgacgagctggcggaactggaaaaggaaacggggattgtctttgcaggcagtccgactcagaatgtcggttatgaggttatgagttccctgccaaaggagcgccacgaaaaaccgatgctttccctgaacaagacaaagagtgtggaagagctgcaggaatggcttggcgatcagaagggacttctttcctggaagatggacggcctgaccattgtgctgacctatgagggaggaactctggcaaaggcggtgacgaggggcagcggggaaatcggggaggttatcacaaataacgccaaagtttttgccaatgtgccgctcaacatcggatttacaggccagctcattttgaggggagaggcagtcatccgctactcagattttgaaaaaatcaatgcacagattgaggatgtggacgcaaagtataaaaatccccggaacctttgcagcggttccgtacgtcagttaaataatgaaatcacggcccggaggaacgtccgcttttatgcgttcagcctggtaatggcggacggcgtggattttgggaattccagaaaaaaacagtttgaatggctgtgttcccagggatttgaggtggttgactataaagaggttacaagagataccctgcccgggaaggtgcaggaattttcagatgcggtctccggcaacgacataccctccgacggcctggtgctgctctatgacgatatagaatacggccagtcgctgggcaggacggcaaagtttcccagggattcaattgcgtttaaatggatggacgagatacaggagacgacgctttcctatattgaatggagcgcatcacgtaccggtcttatcaaccccgtagccgtattcgagccggtcgagctggagggaacgacggtcagccgggccagcgttcacaatttaagtatcatggaggcgctggagctgggagtgggagataagatcaccgtttacaaggccaatatgattatccccagattgcggaaaacctgactaagagcggagtgaaagacataccaaaacactgccccgtctgcggggcggacacggaaatcagacaaattaacgatgtaaaatctctgtactgcacaaatccggattgtcaggcaaagaagataaagagctttacgctctttgccagccgtgacgcactgaatatcggcggcctttccgaggcgacgctggagaagatgatcggcgtcggctttatccatgaatatgccgatatattccatctcgatcggtatgagcaggaaatcgtgaccatggatggcttcggtcagaagtcctatgacaatctgattgcatccgtaaaaaaggcctccgaaacaaccctgccccgtgtcgtatacagtcttggaatctccggcatcggacttgccaatgcaaagatgctgtgccgccggtttaaaaatgattttgcagcgatgagaaaggccaagaaagaagagctggtggctgtcgatggaattggtgatgtgctggcagatgcctggatcgactttttcagcagtgagaagaataatgagatagtggatcatcttctggatgagctgactatcgaggagacggcagaagaagaggaggcggaaggcgtattcgacggcatttcctttgtcatcaccggttcggtggaacactttaaaaaccgcaaggagattcaggagattatcgaacagaagggcggtaaggtgaccgggagcgtgacggctaaaacaaattatctgattaacaatgatacggcgtcctcttcatcaaaaaataaaaaggcgaaggaacttggaattccgatcatttcggaacaggaatttattgagatggcagatcttacaatggagtagaaatatatgtataaagcgctcgtttttgattttgattttaccctgggcgattcggcggccggtattgcggccagcattaattatgcccttggacggcttggatatccggagaaggagatggaagcgatcaaaaagaccatcggtctttcgttaaaaaatacgtttaccgcattaacacaaaatgaagatgagcgggaagcgcacctgtttgccggatatttcagggaaaaagcagatgaggtcatgacggcaggcacgaagctgtatcagcccgttaagaaggtttttgcagacttaagggaacagggatgtaaggttggtatcgttacaactaaatatcattacagaatcgatcagatactggacaaattcggtatcagctctgcggttgatatcattgtgggcgccgaggatgtaaaaatagagaagccggatcccgagggactgcttattgcggccggatattttggcgtggggaaggaacatgtgctgtatgtcggtgacagtacggtcgatgcaaagacagcggaaaacgcgaagattgattttgccgctgtgctgacgggagccaccactgccgcggaacttgagcagttttcccatgtctgtattgcagaggatttatatggcgtttatcaatttgcatgccggtgagcatccggagtccggaacagataatcttatagggccggagaaaaggaagcaaacgggcagaacggctgcctgtctgttccttttctccggccttgtcatggccttttatcgtgtcaattaaatggagtggtacaggcgggtgaaaatatccacgtgcatctgttcatcggcggcaattctgcgcagattatcacatacattcacatctttaatccaggcggtctggttcatatactttttgactgcggcctcttccccctctattgcctggctgagaatgatacggagactggcctttgatacagggcacccgtaagccgggggctgaatatgcggatagtgcagacaggccggactccagtatatgtatctgccgtttcgcggatgacggctccagagacggggattttcgcccaattgcattgcaagctctgcaaaaatctgcatgtgatgcatttccacaataccgatgaaatgaaacgcatcgctgatctccctgtgtcccatcgtgatcagattattataaaaatatagtcccaccgcagacatttccgaattttggctggccatgttatcaagcatcgccatgccatactgacggttttgtccggcagctttgatgggaggatatggagtagcggcctgatatgcaatcgaatatgcattggaatccggggattcggcacagggagccgggcactggttttcctgcctgttgcgggtcagagcggcggtctggatattctgcaggataaccgttttctcagcggaattttccctgtccgcaggcccggccgtttcagacctgaccgtttcatcgcgggcagccctggctgcctcagccctgggtgattcaggcctggctgtctcagctctgggtgcctcaggcctggccgtttcagctctgactgtttcaattccggctgttccagatccggctgaaccagtaccggccgcttcatttgctgtttttttgctgccggatccgggggccgaaggaataacgggctcctgcctcgcattccggttctcacaggaagcgtcgggccagactccgggcagagattcatccctgtagtgctgcgcggctgcctgccggttgaaggaacggttcattggatagctttgctggtgattttgctggctgtttgtatgtctgttctgtggataaactgattgggcgcttacagatatatcgggctggggcggcagactgaactgtcccgactgctggataacctgacgcgcactcttttcagaaatgggttcattcatggaatcaaatccttttttgtcctgttctctatctattttatgaaccggactggcaattatgtttaaaatatgatatgatactagacacgactttttggtgaaagaggtgggcatatgccaattaaaattcagaaggatcttccggccaaggtaatcctggaatctgagaatatatttgtgatggacgaagagagggccatgagccaggatatacgtcctcttgaaattttgattatgaatctgatgccggtgaaggaggatacggagacgcagcttctgcgcgcgctgtcgaacactccgcttcaggtggactgcacatttctgatgctggaatcccatgtatcaaagaatacgtcggccagccatttgaataaattttatatcacatttgatgaggtcaggaagaagaaatttgacggtatgattattaccggcgctccggtagagaacatggagtatgaggagattcattactgggatgagcttattaagattatggagtggagcaaaacccatgtgacatcgactttacatatctgctggggagcccaggcaggcttgtattatcattatggaatccccaaatacccgaggaaaaagaaactttcgggcgtctaccgtcataaggtgctggaccgcaaggtgccccttgtgaggagcctggacgattatttttactgtcctcattccagacatacggaggtcagggaagaagacatcagaaaacacgatgaactggtgattcttgctaaatcagaggaggccggtgtgttcctcgtgatgagcagggatggaaaacagatatttatgcaggggcatccggagtatgacaggatgacgctcaataatgaataccaccgcgatttgaaaaagggcatgaaccctgaggttccgtgcaattactacgaggacaatgatccgttttcacctccggtgctgaactggagaaatatgtcgaatacgctgtatacaaactggcttaatttctacgtttaccagactacgccgtatctgctggaagaggaagagtaggaagtcctttaaacgtttgcagaatcaagaggagtgggtgaatttagaggatttatccatgttcggaatggtggcataagtgggcatgatttagcatgatttggatcaggattggtatgaaattggtttcaaacacagtaaaataatgccaaaaaataataatttgtgaaatgtgtaatatttcaaattaatattccgacatctgaataagtctatgagtatgcagaccaaaacatattcgtaggcttattttagtgtctaaattgtcacacagaagaaccatggagtggcataaaaccgctccacggcattctggtgcgtctcagcggtattggcagtacctatgaacgtcttacatgggaactgaacaatggggcatggcatgtatttggtgctgacggatatgctaagagcgggctggtttttgccccggctctgggcggatatttctacatagacatcaacaccggtatgaagacaggctggcagctgattgatggaaaatggtattactccaaaccgatttctgatagtaaacggggaattatgtttacagatgcctggatagacgggggtatgtagacaaaaacggcatctggaacggggaagcaaaaatgaactgacagggcttgatgtgccttgctttttgctgtagcggtagcttgctgaggataaatatggtattattaaaatagtatgagctaaatgtagtagcaggagattaacatggaaaatactatcaaagaaaaagagtatgagaaattagtgaagaggatagaattttttgattctatgagaaataccttgttaacattttcttttacagcaacattggctgttttaggacttgctatttcagaggcgatggataccagaagttcttggatatgcttaattccctttttattaataattcccttttcggcacgaatttcttattatagattagccagtgcgcatataaattcatttttaagggaatatgcgcctttgtcaatgaagtttgaaataggagcggaaactgtaaaagaaggaaaatgtaagcattacaatttaattgcttggctggtcaaccatgaaatgttttttttaggaatagctactacttgtacattttatgtcaaatatctacttagtatcgaaaaatgggaattaccttactatctgggtataatcattcctattgttttaaactttattgtctttgtgatttctgactctgcctataactataatagattggtaaaggagttctcggaagattggaaaaggtataagagtggctctttctagtttttcctgaacgattgtccgggtgattgccggaaggggaaagagcggaactgatagacggccagctctattatttggctccaccgagtactgctcaccaaaggattcttaattacctttgtacggagattaacctcaggctactgtattatgcggtagtcttttcttttccacaattatacctctgtcaatctcagtgaagattgttctgtgaattatatgtcaacctacttgacatatacatacataagaactacactgtgaaaatcaaatataggcactggaaaagcagaaaggaacagatatgaaaattgtaatattggatggttatattaagaacccgggagatttaagctggagccgctacgaggagctaggcgacttgacgatttatgacagaacgcaggctgaggatacaaagctcattattgaacgaataggggatgccgaggccgttctggtatccagtgtgcctcttaacagggaggtaattgaaaattgtaccactatccgctacataggagttttatcgaccggatatgacggggtggatatcaaagcagccagggaaaggaatatccctgtatgcaatatcccaacgtacgggactaactccgtatctcagtttaccattgcattactgttggagatatgcaaccgtgttgggcaccacgatgaagctgtaaaagcgggaagatgggggcagcagcctgatttctgcttctgggattatcccttgattgaactatcggggaaaacgatgggcgtcattggatttggacggattggacagcagacagccgctgctgccgctgcgctgggaatgaagctcctttataacgacggattcagaaagccggaactggagacggaaaattgcaggtttgccgacagggatgaactattcgaaaagtcggacgtcattgcactgcactgcccgctgttcccggatacaaaaggtctgattaaccggaatacaattgcgaaaatgaaggacggagtaatcctgctgaacagttccaggggcgctcttgttgttgatgaagatctggcggaagcgttaaacagcggaaaagtatatgcggcagggctggatgtggtatcagaggagccgatttctatggataacccccttctttcggcgccgaactgtattattacacctcatatcgcttgggctgctaaggaaagccgggccaaactgttagatttaggtgctgataacctggcagcgtttgcggcagggaatccggtgaatcaggtgaactgaatcaggtgatattccatagggctgaaggcaacgcgctaaaagctaaccattaacactagtgaaattattagaaccgctagggataaagtcttattatggttccacatccgtgttccgccatagctgccaaaagggaagattggtatagaatgatacagcaaaatgctggttccaaaggactgggttgctgcccaaatgggtgatgtattacactggaataaggagagagtaaatactaataaaatggcaagccattcgcagaatccttccatagccatatcccgcttgaattgtgtggagcgactatatttcttaggataataccgccccaccatagggaatactccacctaaagcggcaatgcaaaatgaaagcaacagaccaccgggggtaagacggaaacaccattcctgttttgaaagtttgacagcaatagtcccgcctgccacaccagagaataataatataagaataccgatagcctttaccacaaaatcattgaatgtaaccccaaagcgcagggctggcaggaatgtcaggatagcaaccacaatgaataatgcaatttggctcgacgatgattgaacctttgagggcattgtgccccacagttcgtgccccacagcaatacaactcaagccataaaaccaaaagaaaagagagcccactagacctagctgtccaataatctggatgaatgtgactcggttgtagccattgtttacaaacgctttccaagatgcgatgttgtcatcgcgtaccatagtaattactgtatcacagccacgatctttcagagactttgtggctgcttgatatagtttgtttcccataccctttcccacatgatttttggcaacaaaagcagtttcgataaatccgattttcctccctgcttttccagagagtatcttgtaggctataccgcctaatatttcttcattttccacagccagaaccgcatgtttaggctttggcataaacaaagcttcaacaatcccaaaactactatgtcccactttgtttactatgtttgcctcattcggcatcatctcacgaaactcaatgctcatgggtgctctccactctctattttatttattaaattttcgtaccaatttatttcaaattcaaataatgcaattccgtaatctaaagtggtgatctgatattggatcaattccggcagaggatcatagattgctgatttaccagtcgattctaaaacctccttttgcaatgtaattagcgcttgccagtctgttttgagactcactaaataggattttaataagggcacccgttttttcttttccacagcgcccatgaagaaaagctttgtgagttccatgttttttgctttataatgacgcatgggcttgactatccaagcgttgaaaatctcgcgaccttcatcggtaatctcgtactgttttttgtttttgccattttccacgtattcggtatatactattagattttccgcaatcagtttcttaatcgccacctgtatactaccggcgctgtccgaacacatcatagagaacttttccttaatgtgcgcccgtaattcatagctggtcatgggtgttattaatagtaaaccaagaataattttatccatccgaaaacctctctattagacatatgtctattagttataatgtatcattgattattaaatctgtcaagagggcggctacacctaattgcattgacaaaataacaagccataaaaatccccctaagcagattttggttgtttaccttgtctacttaaggggaatcatactggaatttataattgcttacatataatcgtaaaagccatggccagtcttttttccgtatcggccttccttgtagagattttcgatcatgtcatatccttcagatttaatgccggtttcctccagacgacgcttcagaacatgataccggacatcgattccgctgagatcatccaattcaaacgggcccatcgggtgacccaatccaagttttacggccgtatccagatcctctatggagcagacaccggaatgaattagacggtacgcttcttcttttattacctttagaatattattgacgataaagccgtcctcttctttttgcaccagcaccggtgtcttatctacggcacggcagaagtccatggctttttctacagttgcatctgaaacatgctcgccttttacgacctcgaccaatttcattgcaagtaccggggcaaaaaaatgcaaatttgttaggcgttccggattgctgacaacgtccttgaataaagaagagaccatgtaactcgaattggtcccaattatagcatccgttggagctaaattgcttatttgttgtaatgcctttgtttttgcccttcgatcctcaatgatagattcgatgataatggctgtatctattactgcagtctttaaatcatccgtcaccgaaaagcgggatttgatgctctcaacctgttcagatgtcattctgcccttggcaatccgtcccatcagatactcttcttcccacttcagaagattttcccgcacagcaggtactgtctcacaaaccgtggtcgtatagccatgaatagccgcgtttaaaccgatctgccggcccatggtaccgccgccgacaacagcacattttttattctcgctcataagattttcctttatcctctatgacaaaaaagtttgttttatcccagtacacctttcatcgaaaattctctgatttgttccggagtgtagcccagcttctgcagaattacttcattgctgtcgccgtacatcaccggttcacccacaggaaatgcactgccctcaccgaaacgcacagggcaggaaggaaggatacgttccgcaccattagtgcagtgatatttctgcagatagtcattcgcccaagcttgctcatccgtcagaacatcacggaaatgatttagcctgccgcagactatatccagtttggcaaagagtttaatccattctgtggacgttttattcaaaaatttctcctcaagaagcggaacgatgtcagccgctttttccatgctaaggtccagcgatgtaactcccaggtcctccattttctgacgcacatccagcgtgtcaaaaaatttataagcatagcgttcaaactcaaatatggtgcagcggatccattcaccgtctgcacagcgatagaccagattcatggggattcccatattccgaatctctggaaaacggtgttcatatggcttttcagccataacgataccgccgccgaatgcccaaataccgacgttgaacagggacgtggtgacaaattcaccctgtccagtcctttctcttgtgtataaagccgccatgactgctccaaatagggttgtccctgcaatagtatctcccattccataacgactgttgacaggataactttccggtccgtcgattgtcatgtctgcgctaaagcccgggcgggaccagaacgcaatattgtcaaagcccggagcattgcagtccggcccgttgtagccatatccggtcaatgtagcataaatcagacgagggtaacgctcttttaaagaatcgtaatccactccgagctttatcagtgcattttgacgagtatttgtaattaaaatgtcggctttctccagcagcttaaaaaagatttccttgccttcctctgttttgagatttaagctgaacgatcttttaccgatattaaaaaggtcaaacaaaggattttcatcccattctgtctgtgtgttgctagccgatgtattccgccatgcgtcgccgcctctgccttcaatcttgatgactctggcccccatgtctgccagcatcctgccgacgaccggccctgccacataatttgccaattctatgacagtaattccttccattggtttgttcattgtaatctgacctccgagggatttcctaacaacttgttatacgatttttacaacagcagcaattgcctggccgccgatggctccgcagagtactaatccccactccttgtcagcttttttcagaatgcaaataagccgctccaaaagaattacgccagctgctccccatggattgcctgtcgccaatgcacctccatgaacatttagtttcgttttaacatccgtctctgaaattccgaggttttttgccgctgcaagcacttgtgatgctgttacctcattaacctctatgaaatccatatcctcgatcgattttccggctttatctaaagcattttccgctgctgcggttcccaagaggccccgtcctaagggatcacctgccgaagttccgattgatacaatttccgcaatcggcttgaggttattatcatccaacgaagatttgctcattagcaaacatactgcggcagcatctgcagataaggccttcagctctactctgtcataaatatcatcctgggttatatccaatgtcattttcttaagttttacctttatagaggtaatgttctccttcagggacgattcctctgcttttttttggcttaactgagcaaattccttttggctgtcttcggtaatcgcatatttttcactaatagttttgttaatagtgtcaagggtaaccgttccatacttttccttgggcagaccgcctgtaatcatcgcctcaattggatgcataacaattttatccggggtaaactcataccgtgcattcaatatctcataaggaatttgggacatgttttccgttccgcccgcaagaatgatgttagcatttcctgactttacttttgcgtatccattaatgacagcctgcattccggaagcgtcctgcttctgcaccgtataagccggtattttttccggcaggcccgcagccagggcaacatacctgcccagattggagtgcgtgctggtctgtttggcattgccgatgattacctcgctgatttcatccggagaaagccccgtttccgacaatacggcatgtactgcttcgacagcgagttcttccgcagataatgtttttaaatttccatcaagtctgccgattggtgtacgggcaaatccgcctacaaatacattttccatggtattctcctaacatttttcgataattgccgcgacaccgacgccgccggcacagcacatggttatcattccatacctcgcgcgctctcttcgctgcatttcatacatgcacttgacggtcaacgccgctcctgtattgcccagcggatggccatgggcaatggcgcctccgttaggattaatcttcggaagcagctcttcttcagaaataccgagcttttcccattcttttataacggcaatcgattgcgcggcaaaggcttcatttaattcgatcacgtcaagatcctgtaatgtgagtccggcgcgttccatggctagtttggaggattctacaggccccagccccatcaccgtcggatcacatccgctgcttcccaccgagatgatctttgccatcggtttatatccaaactctctcatcttgtcttcagacataaccagcacggcggatgcaccgtcattacgtccggatgaatttcccgctgtcactgtaccgtctttcttaaacgccggccttaatttcgctaatttttccatggaggaaaggaatgggtgctcatcggtacaaaagaatgtctcatgcccgctaacaatcacgggaacaggcacaatttgatcctcgaatcggccagcctccatcgcatgatgcattttaacctgactgttcatggcaaaagcatcctgctcctcacgtgtgatatggtataatccggccagtttttctgccgtcattcccattggccaaacgccatatttatcgacagggacagctcccggcccgcctgcggtaagcgaatcttcaatcgagaaatcgccgtttctcagcccctcttttgcatttctcatgtaatagactgattggctcatgttttcgacgccgcctgcgacgattacgcctgcctcgccgatcgcaatcatctcaaatgcgtcaataatcgcctgtaatcctgagccacactgccggtttaccgtataagcgggaaccttctccgggattcccgcctgcagtgctgcggctctggcaatatttgcagaatcggatttttgtttgacttcgccaaaaatcacatggtcgatttcctgagcatccagtctcgccctttcttcaagaagatttttaatgacaatcacggaaagagccgtgtcacttacgtccttgagtgatttgcctattttgccaatcgcggttctcactccatgagtgatatatacagcattttttttggtcatttctttctcctattttttaacctaaatttatcttaattcacagtaagatatgtgagtgattcagtcactcaccgcagttcttgctctgttctcctgatcagatcctcctggagctgtttgctcaatcccgtaaagaacgcgctgtatccggcaacacggactatgagatcacggtggttttccgggtggagttgtgcatccttcaaggtcgcctgatctactatattaaactgaacatgccagacccctgcggccattgcgccttttacatattcggcaaatcgctgcaaaccgtcttcacccgtaactgacgcgggactgattttgacattcaggatggagccgccgctcatcaaatcatggttcaatttgccgcaggaaatggcaaccgccgtcggaccggagatatccgcgctattacagggagaatttccattcgcaaggggcgtgtattcctttcttccatccgggagcgcgcacactgccgtgccgtagggcacattggaagaaacagagctaaaaccagggtggaaccgcccgccgtacaaacttctgtatttatctgtctctaagccgtagatctcaactacttttttggcaagctcatcaacgtcatccatgtcattaccgtaacagtctgttttagtggacaggagctgtctcatttcttcgcggccctcaaaattacggtccatggcctctagcacctcagccatcgtgtatttcttttcctcaaacacccactttttaagagccgacagagaatctgccacgtcagccagcccaatccctcttggcgtggggccggagtttatcagagccccacctgcgcttttatctcttgcatttccaatgcagtcctgaataaaactggaaataaacggcgtcgggcacacatctctatgcgctttttctacttttaagatctcctcggaataaatttttattaaataggaaagctgcttttcaaatgcatccatcacctcctgaaagctcttaaattgccgggcgtcgcccgtatgaatgctgacctgtttgtcgccctttttccagtaaccgtcatgcaatgcgaattctaatgcagatgcaacatttagatatccggcgttgtgcgtgcctttttctttacgcgtcggctgaatgcctgcgcagcctacagaagaatagtctctggcgtcttccagggggatgcctttgtacaccaaagcggagacacaccgcccatcattaaaaaatgagggatgccctgcgccttttctggccagccgacaggcctgctccactaaagaatccggcgttccttcaaaataacggaatgaaatggaaggttggtgaagtaacgtgtttatagaggcctgcagacacatataactgagtttgttgcttgcatccttaccgtcaggagtctgccctccaaccatgatctgctgctgagcggggaatcccgaagcgatctgtgaatgatactccgtattaatatagtttgtctccggaaatttcatccacaggcagtcaaccagctcctgagcttgtttttcagtaatccgtcccgtctccaaatctgccttcagatatggatatgcatactgatccaaacgcccgcacccaaaacatctttcatatgcttccatctgaataccgataaaagtgaaccacagtgactgcaggcattcctggaatgtccgcggcggcaggcccggaacacgatcacaggtttccgcaattgtgaggagttcctgcttcctttcgggattgctctctgtctccgctttttctctagccaaatccgcatatctgtgcgcaaaatttgtgattgcatccgcgcagatgatcactgcctttagaaaattaattccttcctggtcctgctgggcctcggcctgttcgagccttttctctgcgttggctttaattccctggaaacctatctccatcaccatctgataatccggggttatatgcccggcaggtccgttaagcggcacatctaaggaaaaaatattggtgccgccggaaacatcgttttccggatccttaaggaacagctttttcgcatccatagacatatcgccaaatacatagctgtacatgcctgtgccatgccatttatgcagcttctcttccaataccagcctgtcctcttctggatattcaaatctatcaatttcccgggttgtcagttttcggtattctccaatgagggaatccccagtgtttccggataaatagggaacgcgcgcggcttgcgcccaaatgaaccggcaaacaactgatcttcctctatgtaaatggaccgttcattcaaaaagacggagtacgcctttgccaaagcaatgacgcgcggatcatcctttaccatgtcagattctttaaatactcttgtatagattagggcgcgctcaatatctacattcggcttataggtcagaaatcgttcccgcaatcgttttaccctgtctgatgcctcgtaatatttcattgtcaaacctccttcgcaattacattttcattataacaacgtctcgtccgctttccttaataatgtttctttgataagctatcaacatctcagccgtactgttcggacaaccagaaaattcatagcttagtcccagctttttgtatttcatctcaccatagttatgaaacggcagcacttcaacgttggtacagttatgcagatccttcaggaagcgtcctgcctcaacagcaatctccgtcgaatcattcatgtttggaatcaccggtatgcggacaataaatactttttcccgattttcttcctttcccataaaatcatttactttctgcagattttccaaaatccgagtattgctcactcctgtagtttttaaatgcagcgcaggattaaccgttttaagatccacaaacaccgtatcagtaaccgttaaaattttttcgagatgttcccacgttccatgtccgctggtttctatcgctgtgtctattccatcatttttacatgccttcagtacctcatacacaaattcaggctgttctaatatttcacctccgcccagcgtagctcctccatgggaggatttataaaaaggtttatcccgcctgactatatccagcacttctttaaccgtgatttcacgccctgccaccgtttttgcgccggagggacacgcctttgcacatgctccgcaatgggtacattttacgcggtcgatttggaaaccatcctcctggctgagatataccgcatcaaatcgacatacttccagacattttccacatccaatacaaagcggcgaatcatagaggatatcgtcccggcgctgcaatccctccggattgcagcaccaacggcaccgtaacggacatcctttcataaaaatcaatgtccgtatgccaggtccatcatgcagggaatatctctgtatatcaaatatttttccacttatactcattcaatgtacctctagcccacaaattcaaaactatatacaatcggtatcagcacaattgtcagaatcacccaaataacgttaatcggagtgccgattttaagaaagtctttgaagcggtaacctgccggcagtgtcatagtgatcgcggttccgccgatcggggtggctgctgtcaggtttgcggcaacagtaaccgccattacaaatgtatagggatttactcccatctgtgcggcaatcgcgatgtagataggagtcatcattgccgcggttgcagtattggacataatatttgtcaatacggtaattacgattacgcatgcggcggtctgcgccaatagattggtgcctactaaactaaccgctgtttccgcgaccattttacctgctccggaatcattcatcgcagccgcaatggtctgtgcaaaggccataacaaaaattgtattccagtctactgcttccgtaacggcttccttgaaagacaggcacccggtaagcataacagcggccgctccaatcagagcaataataccggtctttccccagccggccacaaaaccggctacgcaaaataccaggacgccggcggaaaaccaggttctccacgtaagctttacgtcttcaaaggtgcttgcatctacagtaggaaccgtatcttcaaaatctaaatgcttgttcatcatgccgtaaccaaccgttgcaaagtaaataatcaggcagataaacagaggaaggaccaccggtacgaagtcgaacatgccaaacatcggcagaccctgctgttccaatatggagttagccatcggctgtgccgtggagcctaccagagtaagcgcgccgccaatcgctgtcgccagacccagcggcattaataagtttttgtttttcagcttgccgttagaggacgccaccatagcgccaaccagcgggataaacgttgcgacaacagcagtattagaaagaaaggcgcttaagagtccggaggcgatcatgatgatgaccattacgactcgttcattacttgcaaattttgctttcatgatagatttgccaaccagcagcaccgcgccagttttaaataatgcgttgcctacgatcatcattcccatgatcatcaaggtcaaattactcgaccagccggaaaaaaccttatcagttgtcacacatccaaaaatccccaatacgatggctgaccccattgccaccaaacctgccggccatttatccctggcaaaaataatcaatgtgataagcacaacgattaaagtaaaataagggacgccaatcagtcctgaaattgctgtaaacatgttttttataccctcccgtttctctctattttacgcagcgctacgttgtctaaagtataccaaaaccgacttttttatcaatctcgactttgttaacagtatcttttaaataatataacaataaaatctatttattgaatttacaaaaatgaattgtctttcacaaatgagttcttgtgtgaacgttcacactgatgaaatctagaggatttacacagacgtccccaaggctgtgaccaaattttggtccagagagcgtacgatcagaagaacgtcagcaagcctgtaggggcgctgacgttctttgcgtcattactgggagaaattaatattttaactcatggtttcggggaaaaagatgccttatctcaaacactgagatagcggaaaaagaggcagatagaagagaaccgtgtctgaaaaacaccattaatgaaaacgtaatcaaaaagttgtccctcattattcaggttgcgtagttttatgaataagatatgtctcttcaaaaatcctagaatactcttgaattgcttccaaaaggttcaacattttttttgataagtagcgatccttacgccaataaatggcaatttttctttttggcatatcagactcgatagggacgaatctcaaatcagctaaaaaccccattgataatgccaaatcggtagtaaaagctacataattttctgtgccgtacattaattctctacggaagaaaatatcacattcaattatatttttaaaactaacattattacgtttacaaagttcatcgaagtatttgcgcaaggattcttgctttgagagtacaattattttttcatttgttaaatcttttagtgatagttgtttttgaggcagctgaatttgcgggctaagaactatcactggagattcattctgtattaatacagtactattccaatttgtgtggcggaaatcactttcgggcgaaatgatgaaatcgtattggtctaaattagtctcgtttgcaaggttgggtagagtaatcttggttcgagaaataaatacgttttgattagcagttaaaaaggtattaaaaaaaccaagccaatattgatgagagtatgttccaacatgaataacttcgtttgtattttcttgcatttctgaaagccgtttgattccctcgtctaatgtattgagagattgatcgacatattgtaggaataacaatccactctcatttagttttatattcctgccaacacgattaaataatttaacacctaactcacactctagtctggatataataacacttaacgctggaacagaataattgagatcttctgctgcctttgtaaggtgctcagaccgtgccaatattctgaagcaatatagctgatttaaattcaaagtattacctcccgccatcctcaatgccaccggcctttagtctttgttccattctgcaaaatcagcgatttcttcccatgtatctgagattttaagggatttccatccattctaaaagctgttacatccatcatcatccgtttattttttattataacggattaggtctacttgtcaaccgaattttcttaccttttagccgttttttataatagctgaataattttaagtatataatacagtttcttttcttcacggcaactagctaaatatagccaaaccgctgccaccagccattattgacggcctgaaagaagaaattgagcagtgcaaccggctgagaggcaaaagtgccaaaaagaccggcatatcggatgtttaatccgttatgccggttataaagttttactctcaccaggctgcagtttccatattttgcagaccgctatttttcggaatcaggcagctcatagctgacttccacattgaccttcccgctgttaaatctgactcttccaaaaacaaatgcaaatgctacaacggccagattcgcggccagtaacggcagcggcagttcaactgaagacataaatccggagaagataattacacacaaatccagaataccgatggcttttaaagcagtattactgatataaaaatctgattttttccaggcatctggcatcaccttcggtaatctcaataaacttaaaacgatcatgaatttcgtaatggagccgacggtgatggttatatcactaatcacgccgatgtcaaaatccaatacgatcggcacaaaaccgatgacataatagatacctaataaaatgataggtgttctgaatttaggatgtaatctggcgagggataacggataccagccgtcattacatgcctgcattaaaggttttgtacatgaggcaatggagctgttcaaggttgtaatcagcgccatccaggcacctccgatgacaaaaagataataaagcggtttggaaaggatggttccggcaacaacagttaaaggctggtttgcaacctgctcaacagggagaacgcctgcggccacgacgcccagcagcccataaaagacagctatgccgacggttgacagcagcatgaccctgggaatatctttggtgggattttttgcttccgcgctcagtgatgtgattccctgtgcgccgtcacacgtatagctcatgagaatagcggctctccacagtccgcggaaccctccggtcatccaactgctcttttcaaaatagtttggatccagacgggtaagcccgattaccgtaaatattgtcagcgatataatcagcagcgctaccgccagggtttgaaactttgcaaaaacgttaactccaaaaacattgatcgcaaacagcagggtcaatattccgagcgcaatggccttccttgtgatccatggaagaaacggcattgcataatctgcaaatgaaagagcgtacatggacagtgtaacgctggtaagcagtgaaatcatggagtaagttccggtccatctggggccgagcagagttcctaccatggaatagtcgccgcccctgaatcttgccaccgaattaagaaatatctgtggtgatcttgctaataatgtaatgaaaccgcctataataaaagcgacaaatatcgaacgccccgtacggccgataccaattccggtcaatgacatgataccggaacctatgattgctccggtagcaatcgccattaaatcccaaaaacccaatactcttttcaaatcttttgttgatgttaatttctccgacattacggctcctttcatcagcccagtccacactttccgtgttagagcctgtttgaaaattcattcctgtcatctgcacgccccactttgcggcatatttggcccaaattcagtcagcgtagcccactacgcctccttcattcgggctaaatctcccacaaagtgtgacgcacagctgacagaaagcaattttcagacacgcgctagttcgactggctgctattctttataatttttttcaaattcagctttgatttttccaagttcttccggattggttccgattctgtaacctgtaagcgccatgagcttacctgccaggatactctgatcaagaggaaattcatttcccgtgattgcagccgtttcatcggcatggccgacaggcgctggttcatcctctcctacaatcgggaatgtgatttcaacactggggattttataagctacacagcctaaatccgaagacgccttcggcagggcgccgaaagagaatctggattcatcaatgccaagatccggagcgtatttggcagccagccggtataagccgggaaccggcgtagcgcagtaccatggagcgtcccatttatagagtgcggtggtatctgtcatcagctctgcgcctttgataatattgtcaactcgtttcattaatgcattcagttcggccgaatcgtttgtcctcagctccacattaagagttgcaagatccggaacggaattggcggctgtacctccgtttgagatgatgtagtgaatccggtttgtttccagcatatgttctcttaaaaattccaaacccatggtggtgagaataaccgcgtctaaagcgcttctccccttttccggtgacgatgaagcatgggaggatctgcctttgaaagtcagccagttatcatgagtcggccatacgatggcctttccggtaacttccgaaccccagtccgaaccatagtggctggtaagcataagatccacttcatccatatatccgccttccagaatataatgtttggagccttccagttcttctgcgggggttccaaacacaataaccgatcccgttgtctgaaagacttcttttaatcccagggcagccgcaaatccggcggatgcgataagattatggccgcaggcatggccattgggcagagcatcatactcaagcatgataccaatgacagggccgccttcttttcctttaaaaacagctttgaacgctgtcggcatatcaattttgtggtcaaacttgggatgtttcccaaccagccctctttgtaccttaaacccttccttttccagctcatccattaacaatgcggaagaattgaattcttcccatcccacttccctgaactcccaaatcttccttccggttttgtggattttttttctgttcctgtcgattgcttccatcattcgagtttctacagaattcattttctcctttaccctccatacttttcatagttatatatcctccagccgctctgtttcagcggcatggttatcattataatctcaggccgttaaaagaacgttaatatttatgccgcttttataaaaatacaaaaaaagactacagattttctttttttgaaatctgtagtcaaattagcatccaaatcggaaatgaaaacgtgtcatatattattttggaggtttcgcagagtatctgccttttccggatatccgctgtattcatattgccgtatcgtaaacggaagcagctccagctatcgttccccattcttctgattttcgtaaaatctcgcgacggcatggtgccagagccgtctttttcccatggagagatgctgataaacatagtctttataaaaccggtgccggaatttataaataatataatcgtcccatgtctgttccacgacaaaacgagtcagaagaagctgttccagcacttcgatcagctccatccgatccatttccaccaacagctccagctcctccagctccgcatgctccacaaaaatcgacagagcgtccaatacctttctctgctctttggtaagcttttccagccataactgtatcagcatgtcgattctcggcagcggccgtccttccttccagccgtcctgccggatcatattcagtgtatccatcaatacaagcgcgtttccctctgtgcaaagaaaaatctcacgggtgctgattccggcatcgccgcatccttgcaatgcatttccagtaatttcggttgtctccgcctccgtgaagcacgaaagaggaagagtagtaatgatatcccgctcacgcagcgctgcaaggagcccgcggatatcctgttcgccgtcaatacggcaggtcgcaatcataaaaacctgccggttgcccagttctatcatgacacgctgcaatagccggcggctgacgatatccatccattggaggctgtcaaagtataaaataattcgccatcggccggcaagctccttcaacagattcagtaccccgttctccaaagccatataacttaaatattccccgtttccgccgtgaaccacgtccggattctccgttgccattcctgtaagtacgagatgaatcagtgctgtgctgctttccgtcagacggattttcccttcattctgaagattttcaagctgtttgaaaagatcccgccatgattttaagggaaagtcggcttccgcgcagtaacagtgggagacaagctcaaggacgcctgcgtcacggttcatctcataaatctgctgcatcagagctgttttaccgactcccacttcgccttcaatgacaactgaggcagacggttcatgatttaggaaccagaaaatccgttcatcaatgtattgaagctccgccagccgtccgaagaaatgatccttgcgatccgtttttcggataagcgaaacttctttccggtggaacatggtccggaacagcaattccaccgcatgggaaggctcctcgtccagatccctccgcaggcattttacatactcatgatacatctggattccccaatcgtatttctcggcctgcatatagcatttcattccggtcagaaccatttcctcatcccatggtttccaatattcccacgtgccaatcagacgccggagcctcgttatatcacggcagaccaaaggctcggccagctctgatttaatataatccaggcacctggaaagctggatacgtcttttgttttccacccagacttcaaattccgggcagtctttgagatagaaaaaatcgagaaatctgtcctgccggagagcaaaatccgcttcgggtaaatcccattccgatccgaaaccgaatttaggattcagttccagagaatttttcccatgcagcaggatggcgtctttatccaggcagcgccggatttgaaagagagcctgccttaaatttttgcgtccggaggattcatcgctggagccccagaagacggatattagttcgtcccggttgacctttttctccacacagagataataaaaaatcccttccgctttgcgataaggaaaatggacaatcctgccattattaaacacacccggtatcccgagaagcgtcacctgatattctgacatatctgtaatccccccctgttatatcaagctgcggcgctctgcagtcgcgtatccggcttacttcgcacagtgccatatccaaacttttcagccggttttgaacacggttttactttgttttaacttgtataactataccatattatgatatcaatttaaacatttcggcgggaattaatagaccattttctggataaatccatttgcatatggggaagggggattgctaatgaaattcatgaaccaggagttcctctagtttaccggaaaaacaggcggtatctgccgtttttagcgaatcggtcaaaggttgaccagaaaaaaagttactgctcacaacaatccggggagtgtgtgaagcggcacatcattgctattttaaacaggctttgttatactgaaaatattatattaggaatgctttgagcgccttgttttaaaaagataatggaacaggtctcacaagatttataaaggagaggtggacaatggagtacagaaaatttgcggaaattccggagaaggtttccctgctggggtttggcggaatgcgttttcctgtcagagacgatcagcctgaaaatatcgtggaggagggagtacaggcgctcattgatcatgcccgggagagaggcatcacctattttgacacggcatactcctatcatgggggacggtcagaggaggtcttatcgggggcgcttaggaaataccccagaaactcctattatctggctgataaactgcctatctggctgattaaagaggcggaggacacggaaaaatattttatggaacagctggaacgctgtcagacagagtattttgatttttatctggtgcattccctggaccggtataaatatgagatttgtgaaaagtatcatgtatacgatgcattaaagcgctcccggtcggagggcaggatccggcatctcggcttttccttccacgatacaccggaaatccttgaaaagatcgtgtcggaccatgcatgggattttgcccagattcagcttaactatctggactgggaaatgcaggacgccaaaggacagtatgaaattcttgaatcccgcggcattccgtgtattgtgatggagccaaaccggggcggcgcgctgacatccctcccggaatcatcggcgaagtttttaaaagaagtccatccggagcggtcccttggctcatgggcgatccgttttgccgcctctaaaccaggtgtgctatgtgtgctgagcggtatggagtcggaagcggtagtcgacgagaatgccgccacggttacgggcgtaacgccgtttgatgagagagaggagcgtgcggtcggacaggcagtagatatgttcctgaaaaataagatgatcccatgcaccggatgcgcctattgcagggaatgtccgaaacaggtgaacatcgcgaaaatatttgccgcatacaatcagtatctggtgggaaaagacaattttcagttttataatgcctattccaagctgaaggcggaggaaagggcagggaactgtatcggatgccgcaagtgtatggagcattgtccacagggaatccggatcagcgaagagcttgatatgatacaaaaactggtcgtcaggattaatgagatccgcccgtcaaattgggggagatgtgacggggagccggtcagtccttgtttttacctgcggctaccagacaggtcagaatacatccggataaaagtccggctaagtagcagataatgcccatgcgggaacactcctttcatagattaatgatgaaaagccgtgccgcatgcttttcatccctgttatatatctattattgaccatatttatttagatataagctttccgtaaaaaagcagatattgttgaaccggaaaatggatgttatactatatgtatactaaaaataccctgtccggtggattaaatgcggaatatcgataatatgcagaatacggccagcggacggttaaaatgggaaggaggccagtggtagacagatgaatcagaaaattgcgcttctgctgcaggagcatttcgccgtatactgccgcagagaattggggatggaacaaaaagactgcagtctgacttattttatttatgaaacactggatgaacttcaggatattttcctgaagaataaagagaaatatgatgggttcattacaagcggaataattccgctcaatgccctgcgggatatcgacaccccgccttattccgtcaaaggatatttcggaggctatctggagaatacataccgtattctcctggaacatgtgctgaagagaggcggtgccgatccctccagaatcggggttgactatctggatgacggctctcttctccagtctgtgctggaacaggaccggctgccggagctggtctccgaatttgaaaattccgtcatgggtttatcggaacaggaactggaagcggcagagaggcggatggtggagaagtatttaaagcagtgccgcgaaggggaactggactttgtcgtaacatattttcacagcgtagtcgaagcgctgacaaaggagggggtggaatgctattattcctaccccagccgaaagtctttgatacagacgttggagctttgtattaaaaatgtcagacttgagaaaatacgcagaaatatttctgccgttatccgtatcagtccggacgttgccagatggaagaataagaaaaattccaatcaggagctggaaatgctggccatcaaaggaagcctgctggaatattgcaggctgcatcacgcggagcctgttatgaaggatgacttctcggatgtggaactgtatttgaatacggaacagatacggaaaatgacagatcagtttacctgctttgatttacccgtttacctggaggaaaaaaccggtttctgcggttttatcggcataggttcgggagaggagctgggaaaggccagaatccacgctatgcaggccagggattatggaatgcggctgggcagtaattcctgtatttacattgatgagaaggaggaaatgcattcgcttcctccggctggcgtaaaggaaaaaccgaatgccgggattcctgcttcctatgttgaaacgattgccaaccggtcccatttgtcgtcggagacagtataccgcgttattgccgctatgcagacggaacaatcggatgaattcaccgctgcggatctggtccgggtgcaggagttctcactgcggatcgccacccgtgtattgactgcccttgctgacgccggttatgcggaaaaaatcggccagaagagagttggaaataaggggcggccacagaatctctaccggctcggaattgaatacaacaataacctgcactctctgggcacaggtcaccgtctttaaataaaaacacaggcgcttaatacggcgcctgtgttttttgtatcataggaaagagcgtcctatgatagaaaaacatccgggggcgtactcacctgtttaactaaatcttttgcgtaatgacaccatgaatgttaatgcgagagcagaagtcatgatttccgcggaaagggatgtaagccaaaccccgtcgatgcccagaaaagcaggcagaacggcaagggagacaagcggaaaggccatcgtctgtccgaaggacacggccagtgatacagccggtttattcattgcggtaaagaaggaacctgctgctgttccgatccagttaaacagataggagaaggagaaaagatgcatggcgcgtgaggccatggccgtcagttccggttgatcgccttccataaaaaaaggaatgatcagatgtccgccggtcagcatgaaagccattgccgagatggagatgacggctcccgcggtcatcagtatcttttccagccggaacatccttgtgtacttggcggcgccaaagttgtagctgatggccggctgcagggcatccaccataccaaagagcatggaactgacaaaggagtcaatgtacatgacaatggaaaaagcggcgacagccattgcacccgaaagtcgcagcagcaccgcattcatgataaccatggagacagatgccgaaatatttgagaagaactccgaactgccgttaccaataatgtttctcagtatatgccatgggatgcgcggactgacaaaacgcaggacaagctttttaccgaaaaaggggaacaatccgatgccggttcccagggtcaggctgatacaggatgccagggcggcggaggaaactcccattctgaaatgtacgataaacagccagtcgaaaaacagattggagagtgcgatgaagatattcatccccatactgtagatagtcctgccgcataccctcagataattgtcaagtgcaaagaagatcatgataaaaggggcaaatacggcatagacccgcatatattcaaccgccaggttcaggacgtcatccccggcgcccatcagtctgaccgcctgcgcccctccaaagaatccggccagtcctacgagacaggagatggcaacgataaacaggctgctgaaactgaatacggtgcaggcctcccgttcttttccctgtcccaggcggattgaaatctggacggaggaaccgactgcaatcatatctgagagggcaaaactaatcatgataaccggcattacgagattgattgcggcgagagcattggagcctatgaacttcccgacgaaaatgccgtcggccaccatgtagagggaggagacagccatgccggccatacttggcagggcacagcagaagaaaagtctcaacggtgaaagagtagaaaacattttgtgttccattattcaccatcctctttcattatctcccggctgtaaatatccataacatcacggaggacagccagctgctcctgattatattttttttcaattgtgcgaagagcgcgttcaaagggcctgtcataaacaaccgcattcttttttaattcttcgcttacacgaaggtagtagactcgtttgtccttcccactctgcgtttttactacatggccgagccggatcagttcgttaaccttctttgtgaccgcgggctttgaaattcccagagtttcggcaatagaactgacggtacagttttcctgataggcgataatatccagatacataatactgttgtaggataaattgccggtgattgaccggttgacataacggaagtcatagatagtcatattatagtaaagccggttgaggctgtttctcaaattcataaaattctccaatacattttctatcagcgctttgctgattccgatagagttacaaaggtaaatcaaatttcagattggtaattagttaaccaaatataattagatttagttaacaatataacgtcagggctcttaagagtcaagcagattatccgatttcaaaaaaattaatgaaatgttaataaagtgaaaaaagccgtaataggaattgttgcataaaaatacagcagtttttttgtgaatatctccggagaatctttcattgactttatacaggcagtgtggtagcattaataatataagtacagtactaaaagtatactaaaattaattgggggtacaaaaatgaaagaaaagaaagcaatgaaaataccacatccttatatcattatatttttcatcattgtggtaagtgcagttttaacctggatacttccttcaggcgcattcaggagggaaatgaacgaggctttggggagggcgcttgtggtaccgggcagctatgagaggattccctcagatccggtagggccgtggaggctgtttgaatgtatctatgagggattcgtcgcttcggcagacattagctttttccttctttttgcctgtggatatgttgggattctgatgaagagcgggaccctgaatgcgctggtgggagcgattttaagaagaatgaaggataaagattacctgctgattcccatttttacctgtctttttgcaatcggcggggcaaccttcggaatgcatgaagaggcatggggatttattcccctgtttgtagcgattgccctctcattgggatatgacagagtagtgggagcaggaattgtggaactgggaacagtgacaggctgtgccggcgccatttttaatccgttcaatgtggggattgcaagcggcattgccggagtccctctgacgacgccggtgctgacggttttccggtgcgtaaccctcgtgatttttacggcctgcaccacgctctatctgatgcattatgctgccgtgataaaaagagaaccgcataaaagcgtactttacggagtaaaggaagaagctgtttccatgtcgagggaggagatgcttgcactcccgttttcaggcaggcagaaagtaactctggccctgtttggccttctcattgcagctttggccgtaggagtgacaaaatacggattttacctgaccgaactggctgcgttatttctctgctttatgattgtcaccggctttgtaaatcagatgaacgtgaccggtctggccgaagcttttatagaatcgtcaaagggaatgatatttgcagttctgatgattgggtttgcccgttcgattgaagtgattcttacacagggaggcattattgacactgtggttttatggatggccaatctggtacagagcctgccccgcggcctgtcggccttcggcatgctgtcggtccagaatattgttaacatgttcataccgtcgggaaccggtcaggcggtggttatgattccgattatggctccccttgcggatttagttggtctgagccgttacatagcaattatggcatttcagttcggtgatgcgttttccaatgtattctggccgacagcggtggccatcacctgcggcgttatgggaatcggaatggaccgctggattaagtttgtggccaaattattcggtatcatgttcgttttgcaggccgtgatgctgacaattgcggttgcaatcggcatttaagaaacagtggatgagataaaaagagaaaggtaaaagatatggaacggaaactacgctgggtggagagctttatcggtcatagggagaaagaattcgtgcggctcagcagagagatatggggttatgcggaaacaggcatggaggagagaaaatctgcctttgcactgtgcgggattcttgagagcaatgggttcctggtggataaaaataccgcagggattccgactgcatttgtgggaagctttggagaaggaagaccggttatcggttttctcggagagtttgacgcactggagggactgtcgcaaagagccgggcagagtatggaggaaccggatgaagaacgggaaaacggccacggctgcggccataacctgctcggctgcggttccctggccgccgctctggctgtcagggaatatatggaggaacatgggctttccggtacagtcagatattatggctgtccgggggaggaagagggctgcggcaaggtgcatatggctaaggccggctgctttgacgatttagatgcggctcttacctggcatccgatggattataccggaatcgagggacgcggctccctggccgatttatgtatgagcgttcagtttaccggaaagtcggctcatgcctcttcctgtccgcacatgggccgaagtgcattggatgccctggaacttctgaatatcgcctgcaatttcatgagggagcatatgataccggaggccaggctccactatgcaatcacggatgcaggcggcagcgcacccaatgtggttccggccggagcctccggctcttatgaggtccgggcgccgagacgggagcaggcggaggaattaaaaaaaagactgattcgggcggcagaaggagccgcaatgatgacggatacgcaggtaacaatcacagacgggaacagttacagcaattatgttccgaaccattacctgaacagcattgcctgggaggtgcttaaaaaagtcaggagtcctgtttacacaaatgaggagagggagcttgccgcccgtctccgcaggacttttacggacagtccggagggcagcgctgatacgggaacggaattttccgaagaaccgattccctatcagggactgggcggctgccttatggcaagcaccgatgttggcgatgtgagccttcttgttccttccatgcagctttatacgacatgctgcgcagccgggacgccgggccacagctggcagatggtctcgcagacgggctgctccatcggtgaaaaaggaatgataaccgcggcaaacgtgttggcgctgaccgccctggagctgattgagaaaccggagctaatcctaagagcctgggaggagcatgaaaaaaacaagtaaaaaataggataaaaccggccgctgccttgtcaaatttatgatttcggtataaactgtctttatgtctgatatgacgagagattataatacgggagaaggacagctatggacagaagtgatcgtttatcgggaaaaaaggtgttaatcgtgggattgacacttttttccatgttttttggggcgggtaacctgatatttccgccttttctggcagtacaggcagggacatccattataccggccgctgccggattcttaatcagcgcagtggggcttccggttctgggcgtgattgcggttgcgcgctccggcggcctggaaaaactggcaggccgtgtgcacccggcctttgcacagctttttaccattctcatttacctgtcgatcgggccgtttctcgcgattcccaggacagcaggcacttccttcgaaatgacgcttctgccccttgtgggggaaggcggaaaagcggcggggcagcttctgtattccattgtattttttaccattgccatggttatggcatttaacccggacaagctgacggagcgtctcggtaagatactctgtccggcccttttgatattaatatttgtcatgtttgccggcagtgttttttatcatcagacgatttcgggggagccgtcgggagcttatcagagagccgccgccgtcaccggtttcctggaaggttaccagacaatggatacgattgcggctctgaatttcggcattgtaattgcgctgaatataagagccatgggagtcagagaagacagtcaggtggtacggactacgattcacagcgggatgatagcggggctcctgctggcgctcatctatatggcgctggcttacgtaggcggacaggtacaggcggaggcggcgtcactggataacggggcgaggattcttacatttgcggcaggccggttttacgggaatgcaggagctttactgctcggcgtgattttctttatcgcttgtctgaacacatgtatcggccttctcagctgctgcagtaaatatttttcaactctggttcccgggattgggtaccgggcctgggttgtcttattcgccgtgaccagtgttgtgattgccaatgccgggctcagccggattctggctttttccgtaccggtgctgaatgcgatttatccggttgccatcgtattgattgctttgtcttttatccacaggggagagggagcgggaagaaagatgtatcctgcggcgattttactgaccggcattgtcagtgtgatttattctctggaacagacacggattgtaattccggtgattaccggggcggtctcgcttctgccggggtatggactgggacttggatggttaattcctgcggctattggtatcgggatcgggcggatgctgccggagcatagtagatagagatgagcaggaaaggccttcttaccggcaacgaaaggcaataagggctgtgaaatatacgaaaaaattgagtaaattttcctcccggtgttgacagacgggagcaggagttatataatatggcagacttaaggcgttggacggcagattttcacagccaatccataacaggggccttagtcagtcaaaacagaatagttggaaacttcggtaggtgaggttaccacagggatttggatgattcctaagattgctgccgcaaatttgtggagacacaacgcgctggttagcaggagatgtcgtaaaggcataacctaatgcaattctatcgccctgtgatactaaagcttgtacgttgcagttctggttctccggtagatcggtagaaccgggatggtatttttcagatagaggaaatccgctgcttcgtatagcagcggatttttttgcaggaggccgtaccggagaagacaggaaaatatggaatatgaaaggcaggtgagacgcgatggatgccgggggcagttgtcactcgtgtaattaccggttacaaaaccggacagaaaaacggaataaaagaaagagaggactggacaatgaacagagatatttttatggaactgatggtaaagagggaatacaaggcagtccgcagtattctggatgtgatgaacaccgtggacattgcgtccctgctggaggagcttgacgacagggagatggcgacggctttccgcctgattcccaaagagaaagcggcggatgtgttttcaaatatgaataacgccatgcagtcacatctggtacaaatgtttacggatcaggaattaaaagaactcctggacgatttatatatggacgatacggtagatttgctggaagaacttccggccaatctggtaactcagattctggagaccgtagacggtgaaaaaagggcgcagattaatatccttttaaactatccgcaggacagcgccggaagcataatgacaaccgaatatgtggatctgaggaaggacaatacggtagcccaggccttggcacatattaagaaaacgggaattcataaagagacgatttacacctgctatgtgcttgataacaggaaactggcgggaattgtgtcggcaaaagacctgatgacaatggatgacgacaggacgatggaggagctgatggagacggatattatctctgtttacacccatacggaccaggaggaggttgccagactgttttccaaatacgatcttctcgccataccggttctggatatggaagagcggatggtgggcatcgtgacggtagacgacgcctgggatgtcgctgtggatgaggctacggaggatattacgaagatggctgccatgaatccaagtgagaagtcctactttgatacctcggtgatccagcacgccaagaacaggatcgtctggctgctggtgctgatgctttccgcaacgctgacggggaccctcctgacgcggtatgaggatgcaatttccgttgtgccgcttcttgtggcgtttatcccgatgctgatggataccggcggaaactgcggctcccagagcgcaacgcttgtcatcaggggatcgcgctggatgaaatccatttcaaggatctattcagggtggtttataaggaattcagaatctcactgattgtgggggtgattctggcggcggccaacggggtgaggattttactgatgtaccggaatatgaaactggcggtgatcgtcagcatttccctgattggcacggttgtaatctcaaagattatcggctgtatgctgccgctgctggcaaagaaggtgaacctggatccggcgatcatggccgctccgattattaccacgctggtggatacatgttcgatagcgatttactttactgtggcgacgagactgtttgcattataaggagtgcaggaggggaaacggggctgataaccggatatgaaaaggcggaaccatcgattttggttccgcctttttgactgatggcagtgacctgtgcgcggagcatgcaggttatcgttataccgcggataaaatccagttaataatagcctgattgctggtgataacaggaagctcaagcatttttccaatggcatttcggatctcggcagcacggagattcgtgcaggagagtaaaaggagatcctgttttttcagttcgtgttccagctgcttagcagcctccatgatctcctggggttctacacgggcaatccgggtgtcatcggatattcccaggccgtggcaggctccgcaggagatgccgaacctgtctaaggtttcggtaaaaaatttgtttacctcggatgtgtagggagtcagaaggcctatgcgcctcgctttaaaataccttatttcagataggacagcggagaatgcattggtagcgggacaatccagtccgtcttccagctcgcggctgatacggctcaggccttcctcaccgtacacggccgaggctgaagtgcagccaaagacagcgccgtcaaagtttgtgatatgtttcaaggcggagactgccctgggcagttcttcatccaccatccgcttttccgcctccttgccgacttcatccaactgcattctggcagtatggataataatattggaaggaagagaaatttgcagatccgtttccagaatggtatctgtgtttggcagtaacagagcaatgcgttttaaatcccggcttgacattcttatacctcctgtattctaagataaatcttccgtaatgtatttcgctatgccatcatgtatcttattccgcaatctccaaaataactttatgtgtcttaaaatgttctatataatcacttcccggcagttcgtcggtaatgatgagatcgaaatctttaagctgagaataagtcatcagggaggtctggttaaattttgtatggtcaatcagcagaatatgctcgaggctctgagccatcaccactttttttacctcatattcttctgaggttgcattcgtcaccccgctctggagggaggcggcggtgcaggccataaaggccttgctgatattatagacgctgagactgttgatgcaggggacgcctacgagggatgcagtcttatggtttaaaatacccggaagcgcaatcacatttatgttggggaagctgagagcccggtacatgaactggacactgtttgtaataacggtcaggccctgtatctgtgctatatagttgatgatactcagggtagaggtgccggtatctacaaaaatggtatccccgggctgtacgtgaagagccgcctgcctggcaattttgctttttaaatctatatttgtcgtggttctgtcattaaaggggagaagctctttcacggaaaacggctgctgcagggcggtgacgcctccgtaaaccttctttacggtgcctttctcagccagaatattcaaatccctcagcagcgtgttctttgatatgcggaatacctcgcaaagcttgtcgctggtgacagagccattttctataatatatcgttccatatcatttattcgttcaattctcataattagcagctccttattttcttgaattaattatagcagaatacaaacaaaaaacaagaaaatttatataaatccacaataaagtttcaaaattccatcaagaactattgacatcatacatattaatgataatatatagttaatatacaagggaaattaaactaaaatgtcaaaaaagaaccaaaaacaaaaaagaaaaccaatcaaatcaagctgataactaagatgaaggaaaaggaggagaaggtaatggctattcaatttattatgcccgggaaggtaataatgggagaacgtgctttggatgaggcggcagggcttcttaaggaattggggacgaaggccctgattgtgaccgaccgcgtgatgacggagctgggaaatgtaaaaattctggaggaggttctggaacgggagggacttcagtataccgtctatgacggcgtctttggcgaaccgacggatcatatggtggaggccggaacagggctttacaaaacagcgggctgcgactttttaattgcgttgggggcggaagcgcgctggatacgatgaaagcaattgcagctttggcggttttgggcggaaaaatcacagatatgatgggaaaagagattaaagccgataccgctcccatggtcgcgattcctaccacggccggaaccggttcggaagcaacccagtttaccatcatcacggatacggaacatgacgtcaagatgctgctaaaaggagcggatatcatgccgtcggtggcagtcgtggatccacggtttacgatgacggctccgccgaagattacggcagccacgggactggacgccctgacgcatgcggcggaagcctatacctcaaaaaaagccggcctgctctcagacgtgtttgcgatttctgcggtaaaaaggattttccggtatctgccggctgccttctgcgacggacagaatgtggaagccagagttcagatggcggcggcggctctggaggcaggcgttgcgtttaataatgcatccgtgacggtggtgcatggaatgagcaggccaatcggcgcattgttccatgtaccgcatggtatttccaacgccatgctgattaaggagtgttttacttttgtgctggacggtgcgtatggacggtttggcgacctggggcgtgcgattggagccgcggatgaagaagcgtcggacgaggatgcggcccgggcatttttacatgcggtggaagaactatgccatacattggagataccgacactggaggaatatgggattgacagggagcgctatttcggttccatagacaagatggcggaggatgcaatgctcagcggaagtccgtccaatacacgcaaacagctggattcggaggacctgaagaatatttacagaagtctttgggcctgaaacacatgccggctttatacatatttggcccgtatgagcgcagcccgctaggccgcgctcatacgggccaaatctcccgcaaagtgtgatatacatctgacggaaagcaattttcaaacacgttccagaagaacagattttccaggcaggttccggatttaatcaaattcggtaagatgccttggagaatctgttttttcattttacagaaaagttctcctgttaaatgaaaacagctatgcggagaattgcgctgcgatgtgcgaaagcgtaccggacgagggatgtgcattttgcacaataaaatgctataaaaatctgcataattaatgaaaatgtaaacggctattgaccaaaagtatataatatgctaacatacaatcataaaataacaataaacaaatcaacaacacatcataaataaccaaaaagtaaaatgatgaggtgtaaagcgtataaggagggagtataaaagctataagggagcagaaggaggaagtgttgtgatatgcacaatgaaagaactgctggcagatgcagataagcacgggcgggcagtcggaggttttaatgttgccaatatggagagcgtgatgggcgcaatcagggcggcggaagagatggatacaccgattatcctgcagattgcagagaagaggatggggtattccccggtggaatatatcgcgcctatgatggttgaggccgccagaacagccggagttagggtagccgtacatctggatcatggaaagtcacgggaaatgataaaaaggactctggaatatggcttcacatccgttatgtttgacggctccgatgaaacgctggaggaaaatattcgtcttaccagacagattgcagagatggcaaagccttacggagccacggtcgaagcagaactgggggtagtaggcggaaatgagggcagcggagatcaccaggttctgtatacggatgtgaaggaagcagagagattttcgagggaggcggggatggatgccctggcgattgcaatcgggaatgcccacgggcattataaaggggttcccaatctgaattttgacgtactccgtaatatcgcaggcagggtttctgttccgctggtgctgcacggagggacgggaatcacggatgaacagttccgggaggcgatttgctgcggaatacgcaaaatcaatatcgccacggcaaactttgacgcccttacaaaaggagccgccgactacctggctgaaagcaaagaacataattattttgagctgaacgagcagatggtgcgttatgtctgcgaaaatgtgaaaaaatgcattaaggtattcaataaccgtgaggcagcgccgcagcaacgggtatttgcgggataccgatagacaggagggagaagaaatgaaatacataacatttgatgaggataaaccgtatgatttaatccttctgggagggttgcgattgattttaaccctctggactacaacaagccgctgtatgagagcgagacctttaaaaaatatgtgggtggttctcccgctaatattgcggttggaatggcgagactcgggaaaaaaatcggattttttgcaaaggtatcagacgaccagttcggcacatttgtggagcgttattttgagaatgaagggatagatatctcccatatttcaagatgccaaaacggagagaagctgggactgacgtttactgagatactcagcccgacggagagcagtattttaatgtacagaggcagtattgccgatctgcagctcagtgtggaggacatcgatgaggagtacataaagagtgcaaaagcgcttttgatatcaggcacggcgctggcagcctctccttccagggaagcggcgttaaaggcagtgtcccttgcaaagaaaaaccagataccggttatttttgacattgattacagggcctacacctggaagaatcatgatgaaattgcaatctattattcggcagtcgcatctcaggcagacattatccttggctcacgtgaggagtatgatttgacggaaaacctgattgcgccggggaggaccgatgtggagactgcgaaagcatggtgcgcaaagggggcaaggattgtcgtgataaaacacggcagggagggttccaccgcctatgcctatgatggaaacagcttttctatcaaaccgttcccggtcaaggcgctaaagggatttggcggaggagacggctatgcggcggcatttttatacgggctgctggaggggaaggagcttcttgactgcctggagatgggcagcgccgaagctgccatgctggtggccagccacgcctgcagcgctgatatgccaggcgccgaagcgctttacacatttatcagacagtgcaaggatgagtacggcgagatggtagccagagcctgacaacagtgaatcaaattcagcatgaatataaagcattctggtgatatgtcaagaactttttgaagaagattttgatatgtttttcagaaaaaagggtaactttaacagaccttcggtatattttacgtataaccgaatgtcagttcgactcaatattatattcggtgtccagcttttcgccggtgtacagttggtttttgaccagcaatccaaaaacgagtcgtactaatttacgagatgtaagcgcgagtgctcttttgtgctgatgtttggttacctcagcatattttctggcatagaaatcagcatattcagggatgtgcttcctgacgctgtttgccgcttcgccaagatagcagcgaagatagggatttccggctttcgacattttgttgtcctcagaagtgaaatctccggaatcacccttaggccagtaaaggccggcatatttggcaagggcatcggatgaatggaacacggttatatcgcctatttctgatagaattccggatgcccatatcggacctattccaggtatggattgaaggatgagcagggcgttagggttcattccgttgatgcatttctcaatcgcctgctcgatcagcttgatttctttctgataggcgtggatgcagttaaacgagcttgccagtgatatgctcagtggttcatacatgcacttgtctaaccggtaggaatccctggctgccttgcgcaggagttccgaagtttttgataggtcagagatgcggttcctgctcttccccgcaaggaaggtaagcagatcctcttccggcatatcgataatctcctgcggagacaaaaattccgtcaggacagctgaggacgtggcaccatagagactgccaaaaggcttgtcatcaccttcaaggagctgaagttcactgaacttcagataaagattcgaaaccatataagtcttctccctggtgatgcactcagaaaggtgcatacggtgccttgtaaggcgtttcagggatatgaactgcccgccgcgccatggctccagttttttcgtgcggcctaccctgccgaagtccgcgatgagatatgcatccgtgggatcggtcttttccattccgatataggattttcggtaattcgaagcggcctttgggtttacacagaatacgtaaggcctgtagggcatgagaacctcgctggccgacaggaagtttgaaatatgcacgctgtatacagaagtagattccagcacgataagaaccgtatccaggtttttatgcttctgcatgcattcggcaatcatatttacaagctgatcggcgcctggctggttattgccaaacgacgatgagatgtatttgttttcctcaaagtccatggcatagacggcattggtctttgagcttacatcaatacctacaaacaaggtggacatatagttgagctttaacatgatatcacctccattccgatggggatttgtgaagcctgaagcaaaaggtttatcctgtgccgcatacggtgaccgaaccctcgcgcaatgagcatgcacccagtcagccttttttgctggggctaacggctggggatgaaaattctgtgtcagcggaatgtgccgtatgtgccaggctgaatgctttcaaagcagtctcggacgaagccggctgaaaggaggagaagcagtgccttcggacatcagactctacctgatatcataccacaggatctacctatattgaaatgtaactatcaactgtatagatgggaatcgggatgaggggagtacctcttagatatccttaccatttatacccaaaaaagaataagtctgtaagcggtttttcttgcttacaaacttattatacgaggaggatgaagatgagaaatacgaaaaaagtatggggattattgatggcggcggctatggcagtttcactgactgcatgcggaggcggaaccggctctgcgggaggaacggaaggcacgaagagttcagggcaggaagcagagacagattccggtcaggtatcggctgatgctgctgttgtggatggagtggaggagcttacactgaccttgtcccatcactgttcggaggacgattccaaccacgtatacgcagaggcatttgcggaagcggttaataagctgtccggcgggaagatgacggtggacatttatgccaacggccagctgttcggccaggctgacgcgctgtccgctttatcccagggaacgcttgatatcgccctttccgatactgcgctgttcgccaattatgatccgtccgggctttgtttgatatgccgtatctggttgattccagagaacaggcaatcaagatggtgagagatgaggatgtactttcatttatccgcggtaagatggcagaaaaaggcggtttccatgtgttaagcatacagccgctgtatttcagaagttcactggtgaaaaataaggatatcaacagcttcgacggctttaaagggctgatcatgcgtacaccggaggctcctcatactatcgccgcttttgaagcatttggcgccaatccgaccgtaattccgtccggtgaagcttatactgccgttcagaccggcgtggccgacgggctggaaggccatccggaatacgtttacctgcagaagttctatgaggtagcccagaactatgtacagacaaagcatgtatttactttcaccgcgtattcaatgagccagaaggtttatgacggcctgtcggatgcccagaagcaggtgatcgatgaggcttccgtactggcccaggacgcatttctggaatatacgtccacgctgtttgaggattctatgaagaagctggaggaagagggcgtgcagattacggaggtggatctggctccgtttaaagaatcgaccgcatcatatcttcagaattttatcacagacaacaaccttcaggaagttttcgataagattcaaagcttaaagtaaacaacggtaaagggggagcgcaacggtgctgaataaaattctggatgtgacgcgaaaaattacgaatattattgtaacattcctgtttatggtggtagtggctgtcgtatttgcccaggtagtggcccgttatgtcgccggatcttcgatccggtgggccgacgagctggccaggtttgcatttgtctggctggtctatctgggaggctccatcacgatccgggaaggcagaaatgtatgctttgatttactgctggaggcatgtaagggaaaaacctggaaggtgatgtttacggttgtctgtgcggcatcggcagttttcctaatctgcatgacttacctcggcgttttagtctgccagacccagatggcggaaagttcgcccatcatgcactggcccatggccgctgtgtgcgcggctataccgataggcggagtactgatgttttttgaacaaatcagttattatctggttcatttgaatggaacgcaggatgaaaaaggcgaggaggagtgtgtatgttagttacggcatttatattgttttttgtatttttaatgctgggtgtgcccatcgcattttcgctcggcctcggttcggtagtcgctatctttatggatgataaaatctcttcgatgctggtagcgcagaagctgttttcttccattaactccttcagcctgatggcaatccccttttttatgctttccggcgagctgatggaggccggggcatctccaaacgcctggttaacattgcaaaggcgtttgtggggcatattacaggcggcattggaatggtggatatcggaaccagcgttctcttcgcgggcgtatccggttcggcggcagccgatacggcggccgtgggttccatgctgattccgtccatgctgaaaaacggttatccgagggggcttgcggcggttatccaggcatgtgccgggtctctcggcccgattatcccgcccagccttaccatgattatctactgctccctgaccggcctgtcaatcggcgaatgctttatggccggtgttattcctggtctcatcatcggactcggcgttgcggtcgtcacttatttttatgccaggcgcctgggaataaaggggatgaacgggttccctaccgggagaggctgacggcaataaaagacgggattctggcgattatcatgccccttatcatcatcggcggaatcgtctccggtatttttacccctacggagtcaggggcaattgctgtaatctatgccctggtgatcggaatgtttgtctacaaagaatttacctaccgggaactgccgaggattttcctgaaggcggcttccatgacgggtatggcgctgctgattgttgccggagcctcgattttcagctggcttgtggcttatgagaaattcccgaaaatgattatcactttcctcaccggtttaacggacaacaaatacgttatcatgatgctgctggttctgttcctgctctttgtcggaatgtttattgagactctgtcggcgaccatcatctgtgcgccgattctgatgccggtggcggcccagtacggcattgatccgattcaatttgccctgattatggtcattactcttgtctatgctggagtaactccgccggtcggaggcgtgctgttcattacaatgggaattgcaaaggcgaagatgaaggaggcgcttacctatctggcgccgtatcttggaatcatctgtatcgtcattttactgctgatttttgttccgcagatctctctgctgctgccgagactgctgttctaatcgttactgttcacagaagcgcgcattttggcggggctgtgaatagtgacttctaatcagatatggaagttatatgaggaggaataagggatgaaacttacgttaaatgtttctctggcaggaaagacggccgtcatcacgggagccggaggcgttatctgcggctgcatggccaaagtgctggctgaggccggcgccaatgtggcggtgctggacattaatgagacggcggcaaagaaggtggcggaggaaattaccgctgccggcggcactgcgctggcagtcggctgcgatgtgttgtctgcggagagtttaaaagaggcgcatgagcttgtagccaggacctatggaccgtgccggattctggtaaacggggcgggaggaaataatccgagggccacaacggccggagagttttttgattcttctcagcttggccgtgaaaaaacctttttcgatattgataaagagagctggaagtttgtcttcgatctgaatttcacaggtacgtttctgacaacgcaggaatttgccagggacatgctgggcggggaggcatgcagcattatcaatattgcttccgtgaatacatttcttccgctgactaagatccctgcctatgctgcggcaaaggaggcggtgggaaatttcacaaaatggctggctacttactttgccgggaccgggatacgcgttaatgcaatagcgccgggatttttgtccacccatcagacacaggcgctcttttatgaggcggacggtgtgacaccgacaccgcggcttaagaagataatagagggaactcccatgaagcgtctggggcagccggaggaacttgcgggagcgctgctgtttttattgaatgacgaagcatcatcttttatcacaggcaccgtgcttcccgtggacggaggatatacggcctacagcggcgtgtgatgcccggatgtatctgaatgacagtgatgatccgttctgaggaaaggaaaaatgatgaaggcaataaaaattaataaaccgggagaaatctatgtgtcggagattccggatgcaaagtggaagaaaggatatgcggttatcgaggtaaaggcgctgggagtctgcggctccgatgtccatgcctacgcagggaaaagccctaatgtgtcttatccgctggtgattggacatgaaacagccgggattgtggtggaggtggaggacgaaaaccgctacggaatcaaaaagggggaccgggtcgttctggatccttatctctactgcggaacctgttatccctgttcccatggaagaaccaactgctgtgaaaagctggaggttctgggagtccagacgcagggcagtatgagccggtactttgctcatcccctgagccatatggtgaaggcgccggattccatgacatgggaggagctggccgtgacggagccgctggtaatagccctgcatgcgcttcacagcctgaagctgaaaaaaggtgaacatatcgtaattatcgggccggggcaatcggcatgctggccggaatggcggcgctggcttacggaggtataccgataatggcagatatcgtggatcagcgtctggagcttgcaaagacttttggaatcaaatatacggtaaatccgcagaccgaagatgcaccgggctatattagggaagttaccggcgggcggatggcggagtgtgtatccgaggtgtctggttccgccgccgcagtcagaaacgccctggactatgccgcgccgacaggcagagtggcgctcaccggatggcccaacaggccggtagagcttccgacggcagtgattaccagaaaagaattgcagatagtgggttcccggaccggtacaacggaagaatttgcggaggcggcagagctaatctccaccggccgtgttcccgcggcaaagattatatctaaaatcgtttcctttgaggagcttccgcaggcaatcgcgcatctggacgcctgtccgggagactggctgaagctgattgccctgatatgaaagcggacggcgtaatctttgatatggacggcctgatgtttgatacggaaaggcttggtctggagggctggaaaaaggccggcagaatcctgggatatccgatcggcgcggagatggtggcccggatccggggctgtaaccggacggatgctgagaaaatgttcaaagaacggtacggagagaattttgattacggccgggcccgggagatacggcttaactacgccgcccgggagatagaggagaatggacttcccgttaagcccggtttatattccctgcttgaatttttaaagaacagagagctgcctatggcagttgccaccgcatgtgacagcaaaacggcacacggtaatttggaaaaagcgggtattcaggaatattttaaagctgttatctgtggtgatgaaatcagacacgcgaagccgtggccggatatctttatctgtgcggcaaaacgcctgggaaccgggtgcggtaatacgatcgtgtttgaagacagtgtcaatggaatcgaagcagcgtaccgagcaggctgtatccctgtcatggttccggatcttactgtgccggatgaagcggtgcaaaagaaatgtttttgtgttattaacagcctctgtgaggcagaggcgctgtttgattcgtgcagcgccgcaggccggtccgtatgaaaacggactggcctttttcttattacttcttaatcgaatcccggtgtttctggaatgtgtagatcaaatctaaaatataatcctgttcttccacagtcaaatctttagcagcgttataaatataggacagcaggcgcgcgctcttttccaaatcaaaatcgatgtccatattgccgtttccggtcatcagccaggtctggctgatatgcaggatatcgcaaatagccttgataaccagtgtctggggctcagccctgccgtattcgatatttgtgatgacaccgcgggacatacccagtgcttcggccaaggaatcctgggtatatcctctcgcttttcgcgctatttttaatcgttctccaattgtcatttcccacctcttgaaagataaattttaaacaaacacggtacggaacagataccaatttagattaatatgcaatatttgaatcataacataagaaaaatgatttgtcaaaacaataatagatttttaatacaaaattagtgattgacagcacaaattatgcgtgatatgatgcatctataaaacaaatgtgtgatttttaaatacaaatgatgggaggagaacgatgaataaggaggataacattaaccgtcttgacgcaatcattgagggggccagtaagctctccaccgagaaacaggagttgattctggctgtcatagaggggatggctttcacaaaaaaactttacactcttcagggggacaggagggggacggagaagaaggttaacacccgttccgcataacggataaatacggaaatgctgcgcagctatttcttttatttatagtgtaactggaaacggtaactgtgaagctacacaaaacagttacttattgactattatcaggaggagctattttatgagtgtgtatgatctgttgattgatgtggctattgcgtcaatcctgattttggccgggcagctgctgcgtgcaaaaattcctgcttttcagaaattctttgttccggccagtatgatcgccggctttatcggactggccatgggagaacagggactgggaatcctgccgttttcgacctcgattggatcctacgcggggtgttgatcattctggtttttaccattgtcggagtcaatggatttaagatgggggagacgaagggggcaggtgaagaggtaaaaagggtgcttagcttcaacatgtaccggtttgtcattttctttttgcagtttatcatcccgattacagtgacgctcactgtaatcaaagctgtgaaccccgaggtaaatcagggcatcggaattttgctggcatcgggcttcacgggaggacacggcacggcggcggcctgcggggcaacctttgcagagcttggctggccggaagcgaccgatttgggaatgacgtttgcaaccatcggaatactgacggggatttttggcggcctggcttttgttaaatgggccacgagcaaggggtacaccggatatatcaaggattttaaatatatttcaggagatttgagaaccgggcttgtatcaaaggaaaacaggacatctatcgggaggaaacaatcagctccgtgtcactggacacactgtgttttcatctggcaattgtggccggcattgccgggcttgggtactatctgaacgcaaatattattgcggtccatttattgaaggggattccggactttacggttgcgtacctgattgctttgatattcttctttgcgcttcggaagacgcctgtctacgattatattgataccaatatcaatcagaagatatccggtacggccacggattatctggtgtttttcggaattgcctcgatcaagctgacggttattgtggaatacgcggttccgctggtcatcttaacaattgccggcctggtgtgcgttttcctgaccgtgataccgcttggatatcttatgaataaggacagctggtttgaacgttccctgttctgcttcggttactgcaccggcgtgtttgccatcggttttgttcttcttcggattgtagatccggagaataagtcaaagacggtggaggatgtggctatgaccccattcctcaactttattgagattgccttctggtcattgataccggccgcgctgatcgcaggaaaagggtggcttgtcgtaggtctggtttcactggcatttgtcatatcgctggctgtgacgataggaggaaagatgtggtatacggcgccgctccgggagcggaagacgctcggaatcacagaggagtaagagcaacaactatttattaaataaaatataaaaggaggagcgtattatgagcagtacaaagattgatttcctgtatctgaatgaggaggaaatggtgaaagcgggagtaaccgatatgcaccgctgtgtggaggtaatgggggaggtcttcgatcttatgggaagaggcgactatgtgatgggcggcaaaaaccataattcccatggtatcatgatttctttccctgacgagccggaatttcctaatatgccgaaaaatgggcctgaccgccgtttcatggcgatgacagcttacctgggcggcaggttcaatatagccggtgagaaatggtatggttccaaccgcgacaatgttgaaaagggcattccgcgctccattttaatggtcatgctgaacaatgcggatacgggggctcccgaggcgctgatgtcggccaacctcatcagtgcggtgcggacgggcgcgataccgggagtcggagcgaaatatctggccaggcctgaatccagagtatgcgcactgatcggcgcaggtgttatcagccgtacctgtttcatgtctctgattgatgtatgtacaaaactggatacagttaaaatatatgatatttatccggccgcatcagaaaagctggccgcttatatccgtcagaattatccgcagatccatacaatcgaacttgtcgacagcgtggaagaggctgtgcgggaagccgacgtggtcaatgtggcaacctccggcaaggtatatccgcggattgaggaagaatggctgaagccgggcgtctatgtctcactgccggcaggaatagacctggatcccgattttgtcctgaaccgcgcacgccgtgtggtggataactggaaaatgtacgaagcttggagcgatgaacttaaatatccgtatcatccaatcatgggactgatcggaacgtattatcttgactggcttgcggagggcaggatgaccgaggacatgatcgagaacctgggcgatattgccgcgggcaagattgcgggcaggaaaaatgatgaggagaagattctctttggaatgggcggcatgccggtttatgatgtggcctggggccataccgtatatcatcaggcaaaggaaatgggacttggcacgacactgaacctgtgggataagccgtatctgtattaatccgaaacggcgccgcgcatataatacgtgagtgtgtctgaaaagcagaagaaaaggttggccgctttgcgggcggaaagaaccgcagcggccgggacaggggaaaaccgggcaatgcagatgcattttccggttttcttttgcagtttagtgggaggtatatgttgaagatacagttgacagaaaaggcggcggaaatactcctggccttgaccgcactcatttgggggagcggatttgtgtgttataaaaatctgatgagtcttttgacaccgattcagtttgtggttgtgcgttcctttttttcggcggtttgcgccggattatttttcctgtgtgtgattagaagggcgagccggcgggaatggctgggaggttttctgctgggagggattctggcggcagccggtctggtacagacttatgggatacgcataacatcgtcgggaactgcgcatttctgacgggaacaaatgtggtaatggtgccctttctatcctgggcgctgacgaaaaaaaagccgggccgcagcaatctgttttccgcgctgatgatgtttgccggggtctgcctgctgacggtggactttaacaatataacggctgtcaatgcaggggatctgctgtcgttcctgggagcattcctttatgcggttcatatcgcagtcacgggaaagctctccggcacggtgaggccgaaggcggtgacttgtctgcagtttctggctttgtttactgtaaatcttttgtttgttccgctggaggaaacgccctttataataccgccggctgcagttcttccggccgcatacctgggcattgtttcaatatttatcgggcataccctccagatcatctgtcaggaaaaggtagacagcacgaaagcagccgtgcttctgagcctggagggggtatttgggagcatattcagcgcaattcttctggggagcggtaccggcttcctgcactggccggttttgtgcttatttttttatcaattctgctgtcgcagacaggaggacgcgtcaggaacggaccgggcccggtgtggtgaggctttggctgagtcttccgtccccggctgaaggttgtcgtgagggggaatccggccggaatgaattgctgcggggaccgtttgcactcataacgccaataaacagcgcgcgtcttttgcatctgaaaattgtatttcactaaaggctgtgataagatatacatagggcggcagagaacgtaaccgcactataacggcactgcttcagtgttacggataaagagaacacgggatgaaattgtgtttacacgggggaatttatgataaaagtattcttagtagaagacgaggcaattatccgccgcggcatccgggacaatatcgactggaatgccaacggctttgaattcgcaggggaggcgggtgacggggagtacgcctatccgctgatattgaagacagagccggatatactcctgacagatgtaaagatgccgtttatggacgggctggagctaagccggctggttaaaaaggccctgccccagacaaagattattatcctcagcggttacaatgaatttgactatgcaaaggaagccatcaagattggaatcagcgattatcttttaaagccggttacttccgcaaacctgattgacgcgctgaaaaaggtggcggagacaatccgggaagagagggagaagagtaaacttctggagcgctattttgtaagctatgaaaaatatacggaatttctggataagaccgattacagcggagtcgacagaaagctgatagaggatttcctgaagctcggctctctggatgaatgcaggctgtttatcgaggaatactttgccgcggtgggggagaataattataaatcccttctgctgcgccagtatatggtgatggatatcttttactgtgtccaggagtttttaaagggaatcaatgtgaacacggacgagataccgccggagcgaaaagatatcaaattgataccgaaagcgattacaaacgtggagacgactctgatgtacctgacggatctcttcatttttgccctgacgatgagggaccgggcctcaaacgaccggtacgggaccctcatcagggatgcgaaggattacatagcgcagaattacagcaacagcgatttttctctgaatatgatagcgacccatatcggtgtcagccccagctatttcagctccatctttaagcaggaaacaggccagtcctttgtggaatatcttacgaagtccaggattgacaaggcctgcgggctgttaaaatgcacaacgctaaggacggcggagattggggagagggtggggtacaatgatccgcactatttcagctccacgtttaagaagataacgggccagtcgcccaaagagttcaaagcaaaggaagttaaaaatgaaagctgaagacagcagtcagatgacagaggagcagtccctattcacaacccgcaaaacagccgctgggaataggtatgaggagcagcccgaggaaagaaaaaaaggtctgaggaagcttacgttgaagctgcgcctgacccttctcctgtttgtgatagcaattccgctgaccggaatggttctggggatcctggggatgatccgcaattattccaattcctataagaacatcatggcaaatcttaagacggccaatgaatataatctgaagtttaaagaggacatggaatattcaatgtaccgcgttatgatcggactgattgacgcaggacagtttgaaaacggggatattatagagggaatgagccggtacgcaacggtggttaaaaatccgattaatatgattaattccgccaggtttgcctttgataatacgatagaaagaacgcccggctctgacagcgatatcaaaatcaggggaattttatcctgtctggattcattggagaatgcggtcagcaagatgatagataattcaaagaagccgggcacctatgacgagaacttttcaatctgggagaatgatatccaggggctttgttccatgattcaggattacatcacccagtatacctattatgaaatactcaagatggaggatctgcagaaagaactggaggtccatacaaagcagattgtgggaggcttcctggctatactggccggagtgctgaccgtcggcttcacgctatcggtgatgattacaaagtcggtgacgaatccaatcaataacctgaagcagacggcggaacggcttggacggggagaactggaggcaagggccagaatgtgcggcctggaggaaatcaacgtgctggccagaacgctgaaccggatgagcgatgagatagccggtctgatggagaagacgaagcaggagcagaagagcctgagggaggcggagcttaagcttcaccaggagcagattaacccccatttcctctataatacgctggactccatcgtatggatggcggagggggcaataaccatcaggtggtggagatgaccaccgacctgagcgattttttcagaaccgtactttcgggaggcaatgatttcatcacgattgccgaggaggagacgcatatccgcagctatctgaagatccagaagatccgatacgaggatatcctggattacaatatcaatattgaaccgtctattaaagataaaatcgtactgaaaatgattctccagcccattgtagagaatgccctgtaccacggtatcaagaataaaaggggaggcggcacgataacggtccgcggatacgaggacagaaacggaatcgtcttcgaggtggaggacgacgggatcgggatggacggaccggcgctccacagtctgcgggagaagctgaagggaaacaggaatatggaagtaaataaaaagggaggcttcggtttgaacaatgtggcccagaggattcgtatgtactatggagagggagcagatatcacggttgagtcggaaaaggatatcggaacgtgtatcaaagtatacctgggcgtaaccgctgcggtctgaacgttggagttcggccttcaatattataaagatttagttaagcaggtgaggacgccgccggtacggccagcggacggggtggtggggtgtgtatatgagtctttcgtcccggggagagattgtcgtgggctggggctgcgggcgaagataaagtctgcggagcacgctcccgctctgtgaaatgcatcgcgctgctaggctcgaaaagacctcgccaatcagcgatggatttaggcggcatccgcagactttatcttcccctccgccccaagggaaggttatcgccgggacgaaagactcaaggccaaggatatcgcccgtccgccggcctgcggccgctgatagtctcacgcgttaagtgcgggggcggaccttgtcgcggccactcagtgctaccgtgtaaaaaaatacgatatgccttcaatgcgcctttttaaataattgcagaagatttgatatcagcctgccggaaacacgtagtggccgcgacagggtcctccccatttaaggttggagacaatcagcgcccgaaacggaccatgtccggtgtgcgaaaaccttcgcctgagtcttccgtccccggcgaaaacctgaccgggggaagtaggcggaatcaattgcgtaggggacatgggagtccgccggtgcttagcgaggttcctcacgagcttagcattccgatgcgcactccaaagagtgcaaacggtccccgcagcaattcattccggccggattccccctcacgacaacctacccacggggacggaagactcagacagactcccccactacaccggacatggtccgttccggacgcgtcctccaaacctcagttaaatctccataatatcggttcagccttcggccaaactgcaacaaatgatacgtttgcgtgccaaatcgaaaaaaatcataaacttttcgaaaaaaatcacaagttttatgccatacaggcggtagaaaacggaaatccggcatgaatcagtgtaaaaattttaacttttttcaaaagatgctctgtttcaaaaaaacggagcatcttttataataaggacatagcgatgaagagaaaaacacttttcaccgtgtccggcggtgaaaggcacgcaaggcagagctttcactgcaagtcaacaagggcaacttaaaaacaaggaggaagaagtactatgaaaaaaagatttttatcagcagctcttaccgtagcaatggcagtatccatgacagcatgctccagcaaaccggcagagacggcaccggcgactgaggcagcagcaccggcggagacagaggcagcaggcgaagagacagaggcaaaagaggcggcagctgacacaggagataaagagcttatcaccgtgggctatgcacaggttggcgctgagtccgactggagaactgcaaacacagaatctttcaaatccacatttacagaagaaaacggctataagcttatctttgatgatgcacagcagaaacaggaaaaccagattaaggcaatccgttctttcatccagcaggatgttgactacattgtagtagctcctgtagtagagacgggatgggagaccgttcttgaagaagcaaaagaagcaggaatcccggttattctttccgaccgtatgatgcaggtatccgacgattccctttttgaagcatgggtaggcggcaacttcgtaaaagaaggcgagacatgcggaaactggctggctgattacttagaggcacagggacgcggcgacgaagaaatcaacatcgtaacaatccagggaaccatcggtgcatccgcacaggttggccgtacggaaggttttgcaaacgtccttgcagagcattcaaactggaagatgcttgacatgcagacaggtgaattcacacaggctaaaggacaggaagttatggagtccttcttaaagagctacgacgacatcgacgttgttatctgtgagaatgataacgaagcattcggcgctatcgatgccatcaaggcagcaggaaagacatgcggaccggacggtgacatcatcgtagttggttttgactctgttaaagcagcatttgaatccatgatcgctggcgacttaaacgcaaccttcgagtgcaacccgcttcacggaccacgtgtggctgaaatcatccagaagctggaaaaaggcgagacggttgaaaagattcagtacgttgacgaagcttacttcgatacaagcatggatctggaaaacatcttaaaagaaagagcatattaatcataatacatagcccaatattgattgattaatcaggaggcgtggggccggaggcttaggtttcctccctgcgtctcctttttgatgccgaaaataatgggcagcaattaaaaaagaggaggcaaagcttttatggaaaaggattccgttcttgaaatgaggcacatatataagacattcccgggtgtaaaagctctgcagaatgtggatttcaccctgaaaaaaggtgagatacatgccctgatgggtgaaaacggcgcgggaaaatccacgctgattaaagttctgacaggagttgaggagtttgaaacaggggaaatcatgattgaaggctgtgaccacacaattatcaaccgcagcccccaggaagcacagcagaaaggtatcagcaccgtataccaggagattaacctctgtcccaacctgacagtcgcagaaaacctttttatcggcagagagccgagaaagggaggactgattgactggaagaccatgaacaggaaagcaagcgagctgcttggcagccttgatataaatgcagacgttacgaagacgattgacaactactccatcgcaattcagcagatgattgcaatagcccgcgccgtcgatatgtcggcaaaggttctgatactggatgaaccgacttcctcgctggatgacggagaggtggaaaagctttttgagctgatgaggaagctcagggcggagggagttggaatcatcttcgttacccacttcctggaacaggtttatgcagtatgcgataaaatcacggtgctgagaaacggccagcttgtcggccggtatacaacggcggagctgcccagggtacagcttgtggcaaagatgatgggcaaggattttgacgacctggccgcaatcaagggagagaaagacaagggggcggcccacagtgatgaggatatcgtcattaaagcagccgggctgggcaggaaaggttacataaaaccatttgaccttgttattcacaagggggaggtaatcggttttactgggcttctgggttcaggaagatcggaatcggtccgggttctttacggcgcggaacgctccgatgaaggcaatctgttcatcaaggggaagaaggtagtggccaaacatcctctgacctccatgaacgagggaatggcgtatctgccggaggaccgcaaaaatgaaggaattatcgccgatttgtccgtgagggagaatcttatcatggcgcttcaggctaaacgcggaatgttccgcctgctcagcagaaagcagcaggaggagtacaccgataaatatattgaaatgctccagatcaagacagccagccgcgagactccgattaaatcgctgtcgggcggaaaccagcagaaggtgattatcggaagatggcttttgacaaatcctgatttcctgattcttgacgaaccaaccagaggtatcgatgtcggaacgaagacggagattcagaagctggtcgtgaagctggcggaagaggggatggcagtggtgttcatttcatccgagattgaggagatgctaagaacctgcgaccgtatggtggttatgcgcgacggcgggaaggtcggagagcttgacggcggggaaatgaaccagtcaacgattatgtcaaccattgcaggaggtcagtaatatgaaaaatgatacattgaagaaaataacatcacagcggctgtttctgccgattttctgcctcgctctggtattgctggtgaatgttatcacaacaccgaacttttttgccatctcagtcagagacggggttctgtacggatacatcattgatatcatcaaccgcgcttcagagctggtaatcctggcgatcggaatgacgctggtcgtgtcctcttcggccggaaccgacatctccgtcggagccattatggcagtgagcgcggctgtatgctgcaacattctgtcaggcggggagagggcggcaacggaatttgccaatccattaattctcggatttctcgctgcgcttgcggtcggtattttaatcggatgctttaacggatttctggtttccaaactgaatatacagccgatggttgccacgctcatcatgtttacggcaggcagagggattgcacagcttattacagacggacagattacctatgtccgtgttgacagctacaagattctcggctcctcgttcccgggggttcccgtaccgacgccgtttatcgtggcggttgtgctagtcgtagtcactgcggtaatactgaaaaagacggccctcggcatgtacatccagtcggtcggcattaataaacgggcctcccggctgattggaatcaaatcagtcatgattatcttcctgacctacgcatactgcggactttgctccggtctggccggactgattgcctccagccgtatttactccgcagatgccaataatatcgggcttaacatggagctggacgctatcctggccgttgccatcggcggcaactcactgggaggcggtaaattctccatcgccggttccgtcatcggagcctataccatccaggctctgacgacaacactttacgcaatgcatgtatcttcggatcaggttcctgtttacaaagcgattgtcgtggttatcatcgtaacgctccagtcaccgggatttgaacggtggcgcaaatcacttaccaagaaaaaagagttaaaactcgcagaaaaggaggcagcataatgaagaataaaaaacaactgaatcagaccagcttccttctccttattacaattgtactgtttttcgtaatgtatgcggtcggctgtattttatttaaggatcagggctttgcaagaacccagaactttttaaatctcttcatttccaatgcgggcctgatcgtaatcggtatcggaatgaccgttgtaatgattacaggcggtattgatatcagtgtcggttcctttgtcgccatgggctgtatgatgctcgcatggatgatggaaaagggcggcgtcggagcggttccggccgtgattattgtcctgattaccggtattgtcttcgggctcgtacagggattcctggtcgcctatatggatatccagccctttatcgtcaccctggccggcatgttctttgcaagaggcatgactgccattatttcgaaggacatgatcagtattaccaatgagaccttcatggcatgggcaaaagccaaaatctatctgcctttcggcgggtatctgaataaaaaaggcatgatgatccagccctatatctatccgaccgtcattatcgcccttgttcttcttgtcgcagcctttattatgctgaaatacacgaagttcggccgcagcatctatgcggtggggggaagccagcagtcggccctgatgctgggactgaatgtgcgcaaggtgaaactgaaagcctacgttctggacggatttttatgcggcgtcggcagcgtcctgttctgcctgaatacactgggcggattcgtggagcaggccaaaggctttgagatggacgccatcgcctcctcggtaatcggcgggacactgctgaccggcggtgtgggaaacgtcgtggggaccctatttggcgtcatgattaaggcaaccatagaagcatttatcaccttccagggaacattatcttcctggtggacgcgtatcacgatagcagcccttctctgcttctttattgtgcttcagtccatattgacaatgctgaaaaagaagaaataaccgataaccgatgatgtttaacgactgcaccgaaaaacggaggaaatgcatagatgaaaacagcgaatattccgacagtaaaactggggttgtggcggtcagccgcgactgtttcccgattgccctctccacagaccggaaaaacagagtctgcggcgaactggcccaatcaggggtggatgcctataactgtccgactacggttgaaaatgaaaaagatatggaaaaggcgcttgaggaagtgagaaaggcgggatgcaacgctctcgttgtctatctcggcaatttcggtcccgagacgccggaaaccctgcttgcaaaatactttaccgaaggcccggtcatgtttgccgccgctgccgaggatgcggcggataagctctgcaacgaccgcggggatgcctactgcggcatgttaaactgcagctacaatctggcgctcagaaatatcagggcatacatacccccctatccggtgggaaccccggaggaagtggcggggatgatcctggaatttatcccgatcgccagatgcatcctgggcctaagaaatttaaaactcatcaccttcgggccgcggccgcaggattttctggcctgcaacgcgccaatcaagtgtctgtatgaactgggagtggagattgaggaaaactcggagctggatctcttcgcatcctttaatgcacatgcggaggatgaacggattgacgcggtggcggaggagatggcaaaagagctgggaggcgccaataaaattccggaaatccttaaaaagctcgcacagtatgagataacgctggaggactggatcgaaggccataagggccatcggaactatgtggcaatggcgaacaaatgctggccggccttccagacggaatttaaatttgttccatgctatgttaattcccggctggtggaaaaagggatcccggttgcctgtgagacggacatctggggagcgctttccgagtatattggaatctgcgcatcggaggatgaggtaaccctgctggatatcaacaattccgttccgtccgatatgtatcagaagaggatagagggagtatatgattatgcccagacggatacctttatgggattccactgcggcaacactccgattacgaagctaaaaaaagccgatatgagaaatcagaaaatcatggccagaaccctcccggaagaatacaccttcggaacgctggagggcgatctggcgccatcggatatcaccttcttccgtcttcagagtacggcggacgccggactccgcgcctatgtggctgagggggaggtgcttccggttgacacggagagctttggctccatcggtgtgtttgccataccggagatgggccggttctaccgcaacgttctgataggtaaaaattatccgcaccacggtgccgttgcattcggacactatggaaaaattcttttcgaggtatttaagtacctgggcgtggaggatgtcgcatttaatcagcctaaggggatgatgtatccggggagaatccttttatttaaggcaggcgggacgcggccgggacggccggaggacgggggagtgggagtgttttggatgactcttcagtcccggggtagtgccgcgagttggagctgcggagaggatcaatggaaggttttcgccgggactgaagactcaggggagtttttgtcccgtcctccggtgcttagcggggttcctcacgagcttagcatccgctgtgcactccaaagagcgcgagcggtccccgcagcaattcattctggccggattcccctctgcgacaaaccgtcataggggggccaaagactcattcacaaacctctgctccgtcttccggccgcttttgcggcgtccttatttttcaaccaacatattgatcttatcagtgaaattatatattattaaaatcaggaggtaacaaaatgcttgttacagcaaaaaattataaattctggttctgtaccggttcacaggatctctacggagacgagtgcctggcccatgttgcggagcattcgaggattattgtggaggaactcaataaaagcgggaatctgccgtttgaggtggtttggaaaccgactcttatcacgaatgaagtgattcggaaaacttttaatgaagcgaatcaggatccggaatgcgcaggcgtgattacgtggatgcatacgttttcaccggccaagagctggatcctcgggcttcaggaatacagaaaaccgctgtgccatctgcacactcagtttaaccgtgagattccctatgacgccattgatatggatttcatgaatgagaaccagtcggctcatggaggcagggagtacggccatattgtcagcagaatggggcttgagagaaaggtgattgtgggctattgggcggatgcggaagttcaggctgcgttagcctcatggatgcgcacggcagtgggagtgatggaatcttcccatatccgcgtgatgcgcgtggccgataatatgagaaatgtggctgtgacagacggtgacaaggtggaagcgcagatcaagttcggctgggagattgacgcatatccggtaaatgagatagtggattgtgtgaattccgtttcggcggcagacacggatgcgctggtggaggagtattacgacaagtatgatattcttccggaaggcagggacgagaaagaattccgcgctcatgctgcggttcaggcccagattgaaatcgggtttgagcgttttctggaggagaagaattatcaggctattgtaacgcattttggcgatttgggagggcttaaacagcttccgggccttgctatccagagactgatggagaaaggctatggttttggcgccgagggtgactggaagacggcggccatggtccgcctgatgaagataatggcggctaatacaaaggacgcaaaggggacgactttctttgaagattatacctataatctggtgaagggccgcgagggcattcttcaggcccatatgctggaggtctgtccgactattgcggacggcaggattgtgataaaggagtgcccgttgtcgatgggagaccgtgaggatccggcaagacttgtatttacagccaaagaaggccacggcgttgccacgtccctgatcgacctgggcgaccgtttccgcctgatcattaatgatgtggttgtcaaaaaggcggagaaggagatgcctaagctgccggtagccaccgcattctggacgccggagccgagcctggagacaggggcggccgcatggatttatgcgggcggcgcgcaccataccgcgttctcctatgatctgacagcagatcagatgggcgactgggcggcctgcatgggcatcgaggccgtatatattgacaaagacacagatatccgacggttcagaaatgaattaaagtggaatgaggcgtattacaaatttcattaacgtaatttcgacaggttactgttcgcagaaccgcgcttttcagcggcgctgtgaacagtgatagtgacaattcaaagaaggatgatgaatatgagcacagaacaggttatacttagtatcacagaaggaaggacagcgcttgggattgagtttggttccaccagaatcaaggctgtactgaccgatgagacgacggcccgattgcacaggggagccatcagtgggagaaccgcctggtaaataatatctggacctacacgatggaggatatcatgaccggcctccaggcctgctaccgggatctggcccgggatgtaagggagaagtacggacgggagcttacaacgatcggttccatcggaatcagcgccatgatgcatggatatatggcatttgacaagaacggtgttcttctggccctttcaggacatggagaaataccatcacgcaggaggcatccgaaaagctgacggaactctttcagtacaatattccgcagcgctggagcattgcccatttgtaccaggcaatcttaaatggggaggctcatctgacggagctggattacctgacaacactggcaggttttattcactggaaactgaccggaaagaaggtgctgggagtcggggacgcttccggcatgttcccaattgatacggcaacgggaaattataatcaaacgatggtggaccagtttgacggccttgatgtgatgaaggaatattcctggaagctccgggatattcttcctgaggtgcttaccgcaggcgaagaggccggaacactgacggaagaaggtgcggcgcttctcgatgcgtccgggctcctgaaaccgggaattttactctgtccgccggagggagacgccggtaccggaatgacggcgacaaacagtgtaaaggtgagaaccggaaatgtctccgccggaacctccgttttcgcgatggtggtgctggagaaagaattgtccagggtttatccggagattgatctggtgacgacgccttccgggaacctggtgggcatggttcactgtaataactgtacctctgatctaaacgcctgggtgaatatttttaaagagtattctgaggcgatgggaatgaaggcagatatgaatcagctgtttggaactctgtataacaaggctctggaaggcgatgccgactgcggcgggctcatgtcctgctgttatctgtcgggtgagccgatcacaggctttgaagaaggacgtccgctatttgtacggactccggacagccgcttcaatcttgccaactttatgagaacccatctgtacagttcccttgccacacttaaaattggccttgatatcctctttaaagaggaaggggtaacgctggataacctgatgggccacggcggcctgttcaagaccaaaggggtcggacagaaagtcatggctgatgccgcaaaggtacccgtatccgtaatggagacggcaggagagggcggagcctggggtatcgcagtgctggcctcttatatgcgtgacaaagaagaaaatgagacgctggatcattatctggagacaaaggtgtttgccggagaagagtcagtcagaatagagccggatgccatagatgcggaaggatttgaccggtttattgaatgctttaaggcagggcttgcagtggagagagctgcggtgattaattaagtaggtgaggacgccgccgggacggaagactcctgccgagtgtggcgcccgtccaccggcctgcggccgctgattgcctcacatgttaagtgggggagaaaagtcggtatccccactgccatgaggtcaaccacgtgtccgcataggatgcagccgtaattcgataatataccgagcatggggtgaaacaattaaaattcataagaaaggtgagaaaaatgttaaaacatttgaaaaaaaaggtttatgaagcaaatatgcagctcccgcagtacggtctggtaacatttacctggggaaatgtctccggaattgaccgtgacagggggctgtttgtcattaaaccgtccggtgtcgattacgacaaattaaaaccggaagatatggtagtaatggatttaaagggaaataaggtggagggggatctgaatccttcctccgataccaaaacccatctggagctgtacaaccgttttccccagattggcggaattgtacacactcacagtccgtgggccacatcctgggctcaggcgggacgtgatattccatgctatggaacaacccatgcggattatatttacggcagtattccatgtgtcaggaatctgaccaaggaagaactggatgaggattatgagctgaatacgggtattctgattgcggatgtctttgaggagagaaaattggattgtatggcagttccctgcgtactctgcaaaaaccacgggccctttacatggggaaccgacgcatttaacgcagtgcataatgcggtggtattggaagaagtggcgaagatggccgctcagtgtgagtggattaatccgcaggcagagccggcgccccagtgccttcaggacaaacattatctgagaaaacatgggccgggggcctattatggccagggaaattaatttttttccaacaattcaacctataatgattgcataaatagaaatatatagtaaaatgttgtggtaggcagacggtaaagaatgctgtctgttttacgtataacaaactgaaaaatggagaatgaaaggcggaggcagacatgaaattttttattgacacagccaatgtggacgagatcagagaagcgaacgacatgggaatcatctgcggcgttacaaccaatccatccctgattgcaaaagagggacgcgatttcaatgaggtaatcaaagaaataacagagattgtggacggtccgatttcaggtgaagtaaaggctactacggaaaaagcggaggatatgattgcagagggacgtgaaattgcaaaaatccatccgaatatggtagtgaagatcccaatgacggctgagggtctcaaagcggtgaaggtgctttctgctgaaggaatcaaaacaaatgtcaccctgatctttacggcaaaccaggctcttctggctgccagggctggcgcatcctatgtttccccgttcctgggaagactggatgatatttcaacaaatggtaccgaactgatttatgatatcgttcagatttttgataactatcctgagatttccactgaaattatctgtgcatccacgagacatcctctccacatcacagagtgtgcaaaggctggaggagatattgcaactgttccgttcaaggttctgatgcagatggttaaacatcctctgaccgatcagggaattgagaaattcaaagctgattatgaggcagtgttcggcaaataattgggaaaggaatccgcaatggaactcttagaacttaaacaaaaggcaaatgaagtccgcaagggaatcgtgacggcggtacacgcagctaaatccggccatccgggcggctccctgtcggcggcagacattttaacatacctctattttgaagagatgaatatcgatccggcccagccgaagaaagcggacagagaccgttttgtcctgtccaaagggcataatgcgccgggactctacgccgtattggctgagagaggatatttttcgaagaaagatctcctgacactcaggcatattggctcctaccttcagggcatcccgacatgaaacatattaacggtgtcgatatgtccagcggttctctcggacagggaatttcagcggcggtaggtatggcggtctcagcgaaaataagcggcgattcttatcatgtatacacgctgctgggcgacggtgagatccaggaaggccaggtctgggaagcggcaatgtttgccggacacaggaagctggacaacctgactgtgatcgtcgataacaataatttacagattgacggctccatcgaagacgtctgctctccttatccgattgataagaagtttgaggcatttaatttccatgtaatctgcgtagaagacggaaatgatatggagcagcttaaaaaggcatttgacgaggcgaagaccgttaaaggcaagccggtggcaatcattgcccgcacattgaaggggaaaggcgtttccttcatggaaaataaggcttcgtggcatggcaaggcaccgaatgacgaggagttttcccaggcaatgaaagagcttgacgaggctacgaaagaacttgacgaggcaggtggcgcagatggaaaataagaagaaaattgcaacccgggaaagctatggcaacgcgctggtggaactgggaaagaagcatgaaaatctggtggtcctggacgccgatctggcagaggcgacaaaaacggcagtatttaagaaggaatttcctgaacgccatatcgactgcggaattgcagagtgcaatatgatgggtattgcggcgggaatcgcaacaaccggaaaggttccttttgccagtactttcgcaatgtttgcggcggggcgggcttttgagcagattcgaaattccatcggctatcctcatctgaatgtaaaagtggcggccacacatgcaggaatctccgtaggtgaagatggagccacccatcagtgcaatgaagatatcgctctgatgcgtacaattccggagatggtggtcatcaatccgtcggatgacgtggaggcgagagcggcagtggaggcggcctatgaccatgaaggcccggtttacctgcgatttggccgtctggcggttccggttatcaatgataaaccaggttaccgctttgaaattggcaaaggtatcatgctgaagggaggccgtgatgtgacgattgtcgccaccggactctgcgtttcagccgctttagaggcagcggagcttctgaaagaggacggagtggacgccgaagtaattaatatccacacaattaagccgattgacgaagatctgctgattggttcggcaggcaaaacaggtaaagtcgtgaccgtggaggaacactccattatcggcggcctcggaagcgcagtctgtgatgtgctttcagagcaatttcctgttccggtctataagataggaatccgtgatacttttggcgaatccggtcccgcggcagaccttctcaggaagtacggcctcgacggcgagggaatcagaactcaggttgcggagtggctgaacatcaggagatagacggcatttcggagattaaccgtaattaattaagcaggtgaggacgccgccggtacggccagcggacgggttggtggggtgtgtatatgagtctttcgtcccggtggaggattgtcgtggtatggggctgcggggaagataaagtccgcggagcacgctcccgctctgtgaaatgcatcgcgctgctaggctcgaagagacctcgccaatcagcgatggatttaggcggcatccgcagactttatcttcccctccgccccaagcccaggttttcgccgggacgaaagactcaggcgaaggttttcgcacaccggacatggtccgtttcgggcgctgattgtctccaaccttaaatggggaggaccctgtcgcgaccactacgtgttaacacgtgagacactcagcggccgcaggccagcggacggggccgatacacccggcggagtctttcgttccggcgaaaaccttccgggagaagcagtccagccggatatcattctctccggctccgccctgcgaaaacaaaaccacagtatctccttctccatccagcgatgccggcgacgtgtttggaagcttacggcatatctgccgggaagagtccattcataaccgtatgattcagataggaatgaaacgactcataatcttctggagacaaggtgccgggggaagacatgattaccagctcatgtccggtatttcctttgtgatacggcgggtgtacatgtgaaaatgcattctctttaaaaccgcaccgctcatagaacgactttcggtggattgaaatatcatccgagggcggatcgatttccagaattatggttttctcctttttccccaaccattccaaggccctctggccatatcttcggtttcgcatctttggattgatgcagaaatgctctacataaataaagttctctgtttcccagtacaagatgactccggcaaaatcgtttccgtcataaatcaagtcaaaatggtattgactgcattccagaatttttttctgagatgcctcttccctctgctcatgggcggggaagctcatggcatataaggccattgcggctggatacatggcatcttcagccgaggtcagtctcttgaaatttagttttatcttttctttatccggcaggacggctttaaggaaggcatctttgttttctgttttcagccagttcatattctgtgcttttttaaacggcatttttcctccgaaggattttatgcaatccgcatgcatgagcagttccttcggaatgtttttttcgactgcattctgaaatgtttcagtttcgcaattgcagaaatagaaagaaaccgatttagtaagcagtacatttttatattgctggataaactttgcagccggtttgtagattttaccgaaccggatgccggagccgactataatcgtgtcaaataattcgggattggggatggcatgcctgagatcacatacagtgcagtccgtcagctcctttgccagcagttcggcacattcccgggcggcgcctgacttggttgcatagaggagtagtgttttcatctgtcgtattcctttcttgactcgcttgtgaacatatctaaactgtgttcaatgtataataaaaaacaggctttgtcaatggccgtctgaactgttaaccagtagtattccggctcacaataaaaccgggaaccgtacatagcatagtctttatttctttttctgaaaaaccttgtgccaaaagggtttctataaaacaaagcattccttccacgggatgttcaaacccggcctgtccccgatcggtggacagatatacgtgattaacgcccgaatttctgatattagatgccatttcttcagcagaaacagagccttcggcaatgttcagccagtttttttcgatcaggactccggtatcggccagttctttttgaattgccccgctggatttggtgcgattccattcaggatgtgttaatatcatattgacaccatgctttcgtcctgttttgcacagtaaataggcctctttcgtatcaagatggcccgtggcgagacaggcgccgtatttctttataatatcaaagatttcgaatatctcttttttcagctctctgttctcattaaaaattgagataccggggcgttggaaaaaatctcccggcatatcgccgaatttcaggcagttttcagaatctctggtgggcatccagatgatgacagctcccattttcagggagttttctacggcatagggattgagaccgccgacaggttggttaagagccaggccgccaaatgcctttgcggcgctgttactgtgcagattcaccagagctgccctggccgccgtacatccgtaatgcgccttaatcaggacacccgccatgcccgcctctccggcctcacggacgagatcaaaatcgtctaatgcccggtgaaaagcagagggttcggtatgtgtgtggagatcataaccccctttaatcagctcttttgcaatttggcgatatgattccgaaataaagtgtatttgtttcataaaacctccaataagaataaaaataccgtttttgagataaggatatagtaacacctttaaaaggaatagtaaatactgtgttttaaaaacggaataaaaatactttttaaatggtattgttatgcttttattgattatggcgatagaatgacgttgcaagagagcgggaataggaaacagacgggggatattccaaggcgataagatgattggccgcgtcgcttcgaaccgaaaaataaaaggcccgttatttgggcctttagtatggtagacaaacttatattttctgatttttatgggctgaaaatctttgtaaaatcgtaattaccttcctccctattaagacggcggcctgttcacgcggcgcacagcgtgtcggcccgtcatgaaagagattaccgcataaagacatcggctttatcaagttctgattccagttcctcaagtattttcatggaatcggggccgagccggcgggccagttcggcagtgagggcctctgctataaacataagcggaagaataccgcagccgctgttgacagagtttgtatcgataacaatatcggcatagcgggcaatcggattcagggacgtgtttgtaactagaatgattggcacgtggcgatcgcggcagatggcagatacgtcaattgtccgtttggtacagggccaggccgaaaaaatgataataatatcttcctccgcactcaggcggaatattttatcatacaagaattcgctttcgttgctgagctgcctgacatgaggatagaagcggtcgatggccgattccaggtacagggatacagtacgcgaggagcgaagtcccagcagattgattcgggatgcctccatcatcagggtaatagccttgtcaagctgctcgatatttttcggcgtaatgaaattttcaaccgtatgagtggtgtcataccagagcgcatgcaggatatctgaatcagagttgctggaagctttctgaaaactgttcttaattccaatgtaagacgaggcattgttcttcagggatacattgagtaaagcgcggcggaaatcgctgtagctgtcataatgcagcgttttaacaagacgcataacggtagttgctccgactccggaacgttccgccagttcggctacggtcatcataccggcttccacataattcaaaacaataaaattacaaagtgttctctgctttttgggcagtacatcttttatctgggtgatagtatcgagaatgttattttccataaacaacgtctccttttcattcattaagtcgttatagttagattttcagaccgcaatgcggctattgggaggctcgtcatgccttaaacagtaatgttatgtttattatacggcagccggaaatccgtgtcaaataattataaaacaaaaagaaattaatagaattgtaaaaaggcatatttgaacctttttgttgtaaaattgaacaaaaacagccgagtataattggcgaaaaggatgaaaaaggaatattgtgataataaaaggttgaaatataccgaaaaaagatgtatagtgacattgcaacagggatatagagaaaaacaaggaataaatttagtatttaaacaaaaaggagagatatgttatgaaaacaagggaagtagtattttatagtgaaggtgacaagatggcaggaacggtatatcttccggatgattataaggatggggagaaacggccgtgtattattgcaaactctggatggacaggacttaacatggtatatcccgccttgttctccagggcgatgactgcgaaagggtatgtatgcatgggttttgattaccgtggatttaagcccagcgagggaagagaaaaatataccacactggagagggaagtggaagatgtggcggcagcggtgaatttcatgaaagcgcagcctgagattgatccgcagagaattggtttaatcggctggggcgtaggcggagccgtatgtgtggaggtcacggcaagagaggatgcggtaaaggcggttgccacacttaattcctttgttgacggcgtgcgctggatgcgtatgggaatgggaaatgataagtaccataaaatgctgagagctctggaggatgataaaattaaacgtgccacaacaggcgatccggtgctgagacatccctatgagttttatccgaatattgacgagagcggtgatttctatgttgatcagacgctgaagagaatcgacggcggtgtttcagaaaaggccaatcagacgacaggcgaagaattcccgaccccaatgtccagcgtttacgcagagtctttcctccggtttaatatcgaagccacgcttccgaaactggctccaaaagccgtgtttgttggccatggcagatataatgaactccatgacaaaatagaggcggaggaggcataccgccttgcaaaggaaccgaaagagctttattatgtagaaggtaaacataacgagtggatgttcgacggagatccgaagtttgaggctcttgcggatgcaatgggagagtttttcaataaatatctgtaagttcaggggggcaagtagcagttcatgctgtctgaactgttacgattgtaatttatgccatcagacgggcggtgaaaagtcggtaaacgggcgattttcaccgccaaacgggagtctttttgacagcagaaaggggataagggtgaggaaatataaattgggattaatccaaatggatctcgcttttttagataaggaagcaaatctcaggaaggcgtctgagatggtcagggaagccgctgcaaacggcgcttcactgatttgcctgccggaagcatttaatacgggatatctgggaagtgacatcccggccatgaagaaaatggcggagccattggacggcgaatcggttacggttatgaggaaactggcggcggagctgtcggtttatctggttgccccgattatttatgcggcagcaaacggtgaggctgaaaatacggcagtgttgattaatgatgagggagagatagaaggaacttattccaaatcccacccggtgggggatgaacggacttatttccagagaggaaacgagtatccggtatggaatacaaagcttggaaagataggtattgtaatttgttatgacgtatgctttcctgagacgagccgtattctggcgcttcgcggcgccgagctgttgctggtaccgtctgcatggagggcgagccattattttaaagaatggtgggatttaaatcttgcctgccgcgctcttgataatctgctttatgtggcggcggttaaccgctgcggacagagcggggaggaaatttttgcgggcaaaagtcaggttatcagtccaatcggggaagtactggcagcttttgatgttgaggaggaaggaattttatatcaggaaattgacttggagagagttgcaaaggaacgggaatttaataccgtactgaccgaccggcatccggaagattataaaattctgtcagatagataaatgttactgttcacagtaactgagaaatggtcaagacaacaaaggaggaggaagtttcatggaaaagaataagaacggtaacatgcagctgcggaaaatgacatttttcccgccgtttatattgctgctgctgattgttgttgtcagccttatcagcaaagatacatttttaaacctgatcaataatatcaataactggattattgcaaacgtaggatgggtcttcagtattatcgcggtgggcacagttctcgtagctattgcggccgcattttctaaatttggaaatgtcagaatcggaggtgaggatgcaaaaccggaaatctccacattctcatggtttacgattgcccttacaacgactatggcggcgggcgtccttttctggggacctgcggagccaattgcccatctgagcgctcctcccacggagctgacaggaattcttccgatgagcaatgaagcgcttaagttttccatggagacgatgtttttgcactggacgtttattccatacgcaatttatacggttccggcggttgtcttcggttttatgtattataatgcaaagaggccgttttccatcacctccgaaatggctccggtgcttggaaaatatgcggacaataaaaacacctctaaaattatcgatgccatgaccctgttctgcatcggagcgggcatggcaggttccctgggacagggaatcatgaatatgtcaggcggtattgcggaattgaccggaatgccaagcaatgcatccatgtggatgattgtggccattgttatcgcagccatctttattgctacggcagtttccggacttcagaagggcattaaattatgtgccgacatcaatgtctacggctatgttgttttccttcttttcctcctgtttttcggtgcaactgcatttgtattcaatctgggaacagaggctttcggcggatttgttgcaaacttctttgaaaaatccctgttgacaggagcctccgccgacagccagtggccgcagtggtggaccaccttttactgggcgagctggatggcgtgggcgccgacatcgggagctttcatgggacggattgcctatggaagaacagttaaacagacgctgggattatatgtgggcgtatgtgcaatggtaagcgctctgtggatgattcttgtaggaggaaactccctgtttgcccagattagcggagcggttgatctggttggcgtatataataacgtaggtgtggaggcagttccttattcaatgctgagaagcatgccgttctcacaggtgattattccgctgttcctgcttcttatctttctgtcggttgtcactgcctgcaattcaaatatgactgcaatggccggtatttctacacagggaatcacgcctgacagcccggaagcccctgcctggttaaaaatcgcctggggcgttatcgttatgacgcttgcctacattatgatagccacggttggcgttaacggagttaagatcattgccaatttcggcggcatgtttgcggggatcattatgcttggaacgacaatcagctgcgcgattctgatatttaatcataagaaatatgataagacattaaaggatggggaggatgttcttactgatttgcagtaaaaacagcagtccggtacatgccatctggtatgcatcggactgctgtttatattgatggcggtgacctgtgcgcagagcgtgcaggttatcgttctgccattatgtcctccggccgtcccgcccgcatccacctcaatgtttaaaaataatcaaaaacaaactggagctatccgtctcaaccacctcataacggcacccggttgcctctcccagggagatgaaatcctttctggagaaggtgtcggcacggaagccgtccttgcagatgatgacgccgtcctttgttttttcttcatccacttcgcctagcaggcctttacgggcctgttcccggaaccagtccaggcgggtttcccagattttatcactgtatgtactgaagtacgccgtgcctcccggcttcagtgcgttcaggcagccccggatcagttcgccgggattccccttaacggccgacagtccgttctgaaggcagattaccacgtcaaactcaccgtcaaaagtgagactgtgagcgtccattgtcagcagacggcagttggtgcagcctttcaggtattcttttccgagctggacggaattatctgaaatatcaatgcctgtgacggcggcagcggccggagagagttccttcatgatgcgtccgtatcctgctccaatttcaaggatgtgttcattgccggtcagagctttttttacgtagtcaatttctgcctgaagatattgccggattcttggaagttcggtctgatatacctggtagagtccatttgcatttaaattatcctgataatagttgctcatatacctcctcctcgtataataagtttgtaagcaagaaaaaccgcttacagacttattcttttttgggtataaatggtaaggatatctaagaggtactcccctcatcccgattcccatctatacagttgatagttacatttcaatataggtagatcctgtggtatgatatcaggtagagtctgatgtccgaaggcactgcttctcctcctttcagccggcttcgtccgagactgctttgaaagcattcagcctggcacatacggcacattccgctgacacagaattttcatccccagccgttagccccagcaaaaaaggctgactgggtgcatgctcattgcgcgagggttcggtcaccgtatgcggcacaggataaaccttttgcttcaggcttcacaaatccccatcggaatggaggtgatatcatgttaaagctcaactatatgtccaccttgtttgtaggtattgatgtaagctcaaagaccaatgccgtctatgccatggactttgaggaaaacaaatacatctcatcgtcgtttggcaataaccagccaggcgccgatcagcttgtaaatatgattgccgaatgcatgcagaagcataaaaacctggatacggttcttatcgtgctggaatctacttctgtatacagcgtgcatatttcaaacttcctgtcggccagcgaggttctcatgccctacaggccttacgtattctgtgtaaacccaaaggccgcttcgaattaccgaaaatcctatatcggaatggaaaagaccgatcccacggatgcatatctcatcgcggacttcggcagggtaggccgcacgaaaaaactggagccatggcgcggcgggcagttcatatccctgaaacgccttacaaggcaccgtatgcacctttctgagtgcatcaccagggagaagacttatatggtttcgaatctttatctgaagttcagtgaacttcagctccttgaaggtgatgacaagccttttggcagtctctatggtgccacgtcctcagctgtcctgacggaatttttgtctccgcaggagattatcgatatgccggaagaggatctgcttaccttccttgcggggaagagcaggaaccgcatctctgacctatcaaaaacttcggaactcctgcgcaaggcagccagggattcctaccggttagacaagtgcatgtatgaaccactgagcatatcactggcaagctcgtttaactgcatccacgcctatcagaaagaaatcaagctgatcgagcaggcgattgagaaatgcatcaacggaatgaaccctaacgccctgctcatccttcaatccatacctggaataggtccgatatgggcatccggaattctatcagaaataggcgatataaccgtgttccattcatccgatgcccttgccaaatatgccggcctttactggcctaagggtgattccggagatttcacttctgaggacaacaaaatgtcgaaagccggaaatccctatcttcgctgctatcttggcgaagcggcaaacagcgtcaggaagcacatccctgaatatgctgatttctatgccagaaaatatgctgaggtaaccaaacatcagcacaaaagagcactcgcgcttacatctcgtaaattagtacgactcgtttttggattgctggtcaaaaaccaactgtacaccggcgaaaagctggacaccgaatataatattgagtcgaactgacattcggttatacgtaaaatataccgaaggtctgttaaagttacccttttttctgaaaaacatatcaaaatcttcttcaaaaagttcttgacatatcaccagaatgcttttttctataaagataggtgaaatactggccctccggtttctgatttaattgtatgttaggagcagtaggtaagtcaaacaaaatatcaaataatcgcaacaagcacatttttactttgtcaaacgcatatctcataaacgggaagacatcatgcctgctgcagggtaagcgtcacaacaaaccggctgccgccgcccggattatcgtggacggccagagttccgccgtgcatctctgtcagctcttttgcaatgctgagtcccagtccaaaatgttttttatcttttcttgaggcatctccccggtaaaaacggtcaaaaattctctgctttatctcatcgggcaccccttttccggtgtcggcaacttcaattacggttctgaaataaccggcgctgatccgcctgctgccttcttttttatacattttcagccgtacttcctttccggccggagtataggagatggcattgtcgaggagaatcgtgataacctgctccagtctctgccggtcggcaagaagcggcgggaacggttcctttggaagctccagtatgaggtttatatttttttccctgcaaagcgggaggaaagcttcataagcttcaatcagaagcgtatccggttcagtctgtgtgtagtgaagttcccagtttccggcgtcggaggacgccagaagcagcatatcccccactagtctcgccattctgcggcattccctgtcggaattttttatgagctgtctcagtgtgaccgtttgattctgattgcctgtttccccgggcagttcactttccagcgcagagagactggagcggatgacggccagaggggaacgcagttcatgtgaggcggctgcgacaaattcattctgcttccggattccatcccttgcaggctgaagcgcccgcccggtcagaaaccagctgataaccaggatgccgagaattccggccgctccggtcaggacaaagagtgaaagaccctggcgcagcaggacggatcgcggtgtaatataggagagcatcagaaggcttttagcgcccttcgctgtgggcagcaccataacacgcccataataccaatcgcctttgcggccctggatgcggagcaggctggtctggctggcggaggacgagacaggcgggcgtgtgggatccacaccttcctgtccggccgcagtgactgccgcttttataagctgttctctctcagtcggaggcgtccatgcgccggagaagaagaggggcgaactattctcttctatataaataacggcctggtttgtgacttccatctgcgccagataagcgtcgctgatgaaggagtaggactgcaggcgggagctgaccgagaaccagaggttatggaagtcagtctcctgctgctgctccctgagcgaaatattgcggtaagaaataaaggccagaagtatgataagtatactgccggtaaggacagtgtagagtattgtcaactgtttttgtaccttcttaaacatggttatcctttcatagcgatttgattgagtcgatgaggacgccgccggaacggccggcggacgggggattggtatatgagtctttgggcccggattgaagattgtcgtgaaaggggaatccggtcagaatgaattccttcggggaccgcttgcgctctttggagtgcgaagcagtgctaagctcgtgaaggacctcgctaagcactgtcggactcctatgtcccctgcggaattgatttcgcctccttcccccgggaagatgatcggcgggaccaaagactcagctccaggttatcgcgctgtccgctgtccgttccggcggctgattgtcctcttgcctcaagggggtgaggaacttgtcgcagccactacgttcatccggtcaggccccagattgtcaagtcaagtaatatctggtggccgcgacaaggcccccatcaccacttaaagcgtgagacactcagccgccgcaggccagcggacggggccgatatccttggcggagtcgttggtcccgccgatcctcttctccggggaaggaggcagaatcaattccgcaggggacataggagtccgccggtgattggcgaggttttttacgagcctagcaccgctgcgcactccaaagagcgcaagcggtccccggaggaattcattctgaccggattcccccatcacgacaatcctcaagccgggaccaaagactcatatacccaatcccaccccccgtccgccggccgttccggcagcgtcctcacctgcttaattatttttttccaatcggtagccaactccatgaaccgtagtgattttgacgggagcattcagcgtgcgcagcctccggcgcaggaagtaaatgtaattgtcgagatttccatcctccacttcgctggaggccccccatacatagcccagaattacttcgcggttcagtgtcctgccgggatttctgaaaaaatattccaggagggaggattcttttttggagagggagacagatgcattctgataccgcagttctctgtgctccggcaaaaaaacgagatcctcaaaggtgagggtacattcttcctcaatacgtcccagccttcttgtgacagcccgtattctggccagcagctcttctatagcgtagggttttgcaatgtaatcgtcggctccggcgtcaagcccgttaatccggtcatttaacccgtctagcgcagtggaaaagatggccggtgtctggattttacgccttctcagtgcctgtaaaagagtaaggccgtccatttccggcagcatccggtcgataatcaggcagtcatatgcgccggagcaggcatagagaaagccgtcggttcccgtatgacagatctccgtgtcatatccggctttcgtcagcgacatctgaattgttttacataagacttcatcatcttctatcaataatattttcatattcccatcctgttcctgtatctaaatgtgaaaaaatgtgttctgtatttcgaaactttaccttatcattaagtttagcacacaaatctctaaaaaatctaaaaaataaaaggagttttttccagtttttttagagaatcagattgtaaaataaagatataacatacgcagaccaaatcaggaggagatttatgaaaaacagcatagttcaatacgcgataaataaaaaaagaaaacaagtcgggaaacggggaagaatgtttaccgcagcggccggagcgctcatgttgggcgctatgtcgttactgacggcctgcagcagcggcacatcatccgggacacagtccggcaccggagcagcgttccagtccgcggagagcggagcgccgggaggtcaggcggccaaaggccgttacatggaagaagagattgcgcttcctgaagaaattgcagagaacggttatgtgggtgtggtacaaaagaaggacaagagcctgctgtttgctatccccgatgaagaggggaatgacagattctacagctatgatgcggcctcctcctggacaaaaggcgaggctatagcgccgcttggtaatatcagaccggcaaaaatgttcatggatcaaaatgaaaagctttattttgggggattcgaccaggaaaattacacgttccatctctggacggtacaggaagacggaacagttcaggaactgcttccggaggtgtttaaaattcaggaaggccgcagttatggagtaatccccgattttataggaattgggccaggcggagagattttggtttcagaaagctcggaggcgaatgtctatctgcctgacggaaagaagagcgttacactggcccaggattttactggactggatgtcaggattccggcctgcctgacaggcgatgagtacgtgacgatgagtaaccagcagcttgtacggtataatatcacaaccggaaggattacagagcgttataatatgccggaaaatggctcaggcagcaatatgatgataggccagatgcctgtctttaccgatgaggaaggcggtatttatgttgcagatgcgaccggactttaccatatcggaagaaacggcacgctttgggagcagttaatcgacggaagcctgaattccatgggacggcaggatatgtacctgatgaaattttttcaggggacggacaatgatttttacggcatttattcgacctcaaattccaggatgaagcttattcactattactatgacgagacggtagacacggtgccgcctgaaacactgacggtctactccctgaaagacagctatacggtccgccaggcagcggccatccttcagaagaataatcctcagataaaggtggattacaggattgccgtagaggacgagtatgggaaggtgacggaagatgtgatccgcgccctcaatacggagcttttgaatggaaaaggcgccgatgtcctgatactggacggacttccgatggaaacatataaaaataagggtattctggcggacttaagcagtctctttgagaaggataaggatgattacctgcccaatgtaaggggagggtttacaggagaagacgggaagatttattatatgccggcccgtatcaaggtgcctgtgatatatggcggggaggatgctgtcgcagcgttccaggatccggaactgatggctgcatacgataaaacaccgacacttttcgcgccggatatttacgaaaatatccttaacatgaccgcatatacctgttttaataaattgtttaacgacaacggaaccgttgacggcgatgcactgacccgctggcttaccggagtaaagagcgccggtgagaagggaaatgtgcaggtaagctatgatcaggccgacatggaccgtctgaaagtaaacaatacggtaataccatacggtttcggccggcagagtgattttaatcttgcatcaggcagatgtgcggcagcagccgaaatcctcgattcaatcgacagcgccatgctcccgttatcagcagcggagataaacggcagcagttttgaatcaatcggcggaatctatattccgagtgttgtggcaggcatcaatgcatcaaccggaaataaggagaatgcagaagaattcctccgcgttttattcggcacagaggtgcaggacgaatcactgagggacgggttttccgtcagaagcagcagccttgacaagtggagcggtatggagaaatcagtcagtgtctctatgagcatgggcggggaagggattgccctcgagggagaatggccaaaacaggcagaccgcgatatgattcttgcgattgtgcgcaccgtgagcgtgccggccatagtcgaaacgcagattatagacatgattgtggatggttccagagattatctgagtgggaagggaacgatagaaaatgcggttcagacgatcgaaagcaagatgaagctttatgtcaatgagagagagtagtaaaaaagcggcaaaaactacaggggcctggctgtttctggcccccagcctgctgggggtgctggtatttgtcatgattccgttcggtgatgcgctgagacgctcattttttgacagcagaggaatagactttgtagggcttggcgtctatcggggggttctggccaatcaggcattccgcctggcggctgtgaataccgtgcggtttatgggggcagcgctgccgcttctgatggcggtatcctttttcctgtccctgctggtttaccagtacagccggaaaaagagtttttttaaaacagtcctggtcctgccggtcgcagtgccggcagcgtccgttgttcttctgtggaggatggtattctgcgaacagggaattataaatgaactgttcggtcttcagaccgactggatttacggccccgcttctttttcggtgcttatattcgcatatttgtggaaaaacaccggatatcagatgctcctgtggctggcggcgctgggagggatatcggatgagctttacgaggcggcagaggtggatggagccggctggctgcaaaagcttctatacatcacgattccccaggtgaggaaggcggcagggatgatcctgtttttggctgtgatcaactccttcaaggtattccgggaggcatatatcgtggccggatcttatccaaacgacaggatttacctgctccagcatttatttaatcactggtttttaaatctggacgtgcagaaaatgtgtgcggcggcagtccttttaaccattgtaatcggtatttttctgattccctttgtcatcagggcgggaggagatgaataatggtgagaaaacagaggcgttttaaaacgccgtccccgaaaaagctggtgggagctttcctgctggttatctgcctgctttttgtcctgtttccgcttcttctgatggcggcggcgtcatttatgccggaggatgaactggcgcggcggtatctcgctgttctggaactgggaagagagccggtgcttccggctctggttcctgattttccgtctttaaaaccttatgcggatttgtttctacgctcacccggcttctttgttatgttttggaattcatgcctgcaggtgctttgcgtcctggcaggacagcttctggtaggcatgccggccgcctgggcatttgcgagatatgatttccggtttaaaaaaacgatttttctgctgtatctgattcttcttgtcatgccgttccaggtaatgatggttccatcctatctggtcctggaccgtttcaagatactggacacacatctggcggttatactgcctggaatattctccacctttcctgtctatatcatggagaaattctttgaatcgatcccgaaatcatttctggaggcggcccggatagacgggggaggcgagtggacgatattcctgaggattggcgttccgatgggatttcccggaattatgacagccctgcttctggatttttttgaatactggaatgcactggaacagccgctgacatttttaaagaataagcagctttggcctttatcgctttatctgccgaatgtgacggcggacaatgcgtccctggcctttgtggcggggctggtgacaatggcgcctccggtgcttttgtacctcaacgggcagacctatctggaggaggggattgcctcatccggtatcaaggaatagggaacacgaaaaaagattaggagtcgggggaagccgtatggatgagaaagaaaaaatgaaaagaaatttgtaccgccgcctactgatctgtttttttgcatgcatggttttttttacgatattatccagggtgattgatgtttacgagacggcaaaagtcagtatcgcctatgcgaatcaggggaccgtgatgaaaactgtggatggggactgcagtgtggaggcgggagaaacgcaggcaatttccctgattaaggaactgaacgtagagaaagtcgaagctatggccgggacagccgtgaaggccggagaaccactgttttcttattcggcagaatccctggaagacaagatgaggaggctgcaaaaagagatcaaaaaaatggaactggaaatcgagggagagcgtatcggctcagacagttttacgggagtgacaagggcagaggcagcgctccagtccctggcaatggccgaaaaggcactggaacgccagaatgggaagaaagctcaggcggaagccgaatataatctcaacatggaaaaaatcaaagaatattatgaattgcggctcgaactgtcggaggacgaacttttaaaccagagccggaacgattatgaccagagccggacggactatgagtcggcaaaactgcagcgcgattcacagatccgggagataaaaagaaagataaaggacacggaaaaaaagatagagaaattggagaaacaggaggagccggatgaagacgagttggaagaactccgggaactgctggaccgttatgaggaagatttggattccgaggaggaaagctgggatcttaagatagaccgggccagggaagaaatgagcgacaagggcgatatctttgatcgggccggccgcgaggcggacagcgccaagctggccttaaaagagaattatgagtcggccgttacacaggaagcaaaggccctggagtcggccgaggatgcaagaatacaggcagagtgggcagtagagtcggcacggatggagctgcagaatgctgcgaaggaggatcatgcggctgcgcttggtgcggagcaggcaaagaagctgtcggcgctcaggattgaagcaaagcagcttgatttggaagaactgaaggaagaaaaagaagaactgcgaatactgatggaaaaccagggcatggtttatgcttcctgcgatggtacggtcagcaccgtggagattgaggcgggaaaagacatagccggaacagagcgggttgtcctgtccaccgggttgctgaagcttcgcggaacctttgacagggaggatgatgaaatactgagaaccggcgatgaactgcaggtgaggatggcgggaagcgacgaaagaatccaggcgtatgtcgaacaggtggatctggtcaccagccaggagaccggttcttttactgcgagccttccggcaggatatggtgtactgggagaaaaggcatattttgagtgtctgagaagcggagaggtctacaggcaggtgattccggtaaaggctctcagaaaagatgtaaacggatattattgtcttgtgctgagaaaacagaagaccatcctgggggaagaatataaggcggcgaaggtggaggtggagcttctggcaggcggcgatacggtggcggccgtagaaggcccccttatggccgaggaaccggttatcaccgacagtgaccgggtgatcggggaaggcgaccgggtgcgcctgatgacggagcttccgggcaaaggaagctgatacctatacagaaatcggaaatgaaagggagaactaaatgaaatatggaaaaaagattctggctgtagtcctccttcttttatcaggaacaggaatgctgacggcagcagccggaagcagaaccgccgatgcccaggtccgcacggagcgggaccttcagcttcagagtgttacgatggaagagctggaggaaataagggaacgggagaagggagggatgacagggctgctcaatatagcaggatggcggtacggagaggccgggaatgtaaaagagccgctgtccggcaaaaaagcgggcgcaggaacggtttatgtcaatggccctgtttccctggcatttccggcaaaagtgttaagcggttcttacgaatcggtcatgagaaaaaaggattgtgtccttacaagagagctttcatggtccctgttcggttcggtggatacggcgggctgtcaggttgattttggaggaaagacgtacaccgttacagccgtaattgataaggaagaaatggtcatgtttctgacggccgacgagggagccgtgcagaaagcggctttttccttcagtggcagagagcggattgattcgaaaatgaaggcgcttggatttgagtagtaacagttcagacagatgaactgtcactttgggtgaacggttttattcaaaatggtacaaaaaagttatgaaaaaagaaaatctttgtgcacacttttttgatagagtatgctattataatactcgtaaccccccccaatacattatatagtttttgctacaccccataagaacgaaataccttctccttaaagtgaccagctccccggctggtcactttttttcgcttataggaaagtacgaaaagctcctgattgtcagaacaggatatgcatcacgaccgaaacaattggtatggcaatcagtgtcctgataaaaaagattaggataagcttaccaatccccagcggaatttctgactccataatagatacggcgctgttggaaaacatgataatctgaagcgcagatacgactattacgaagaaggcggcttccacggaaatggacagtgtggatatgaatgtggcggggatggctatctctgccagtccaaggatcatggctggggcaatttctgcagcgttggggacctggcataatttcagaacaggtataaatggaacccccagaatattaaacagcgaagtgtattctaccaggagaaaggtgatggaggagattgccattatataggccgaaattttctgggcaaaaacaagcacttccaacagagcttttgcaaaaaccgatgaaacaggcgtatcttccgctttttttagggcggccttatatccatggcggaacaaggacaggctgaattttctgcgttcttcgccttcccgttctgttccgtctataaaggtatccggcatccccctcagagggaagagacggatgacaattgccgccatgacgaaggacagcaagaaagaggcaatcagcactttgccgtaatgctccgtgatattagccgttgcggtcagcactgcaaaaaatcccaggctgataaaactgaagttggtggagatactggcggcttcgcgcgttgtatattttttttctttatacagtttatttgtaaagaatattcccagggtcggattggcgacaaaggaggtgacggcgtcaatggcggcgtatccgggaaccttgaataccggccgcatgagcggttctatcagtacgccgatatattccagcagtccgaactccgtaataaagggaaccatcaggccggcaacaacgatagtgactaacacggtcttggccagtcccagcccctgtccgccgacagccggtccaatcagatattccggtccgatttgcaggatggtcataccgctcagaataaaaccgatcaggtacaaaacaatcgagtatgtttttacacccccatacaggcgtgtcagcgttgggaatttatctgtaagccgggcagtgatacacaaaagaatcaggcttccgattgatatcatgaccagtgcggaaagccagggagaaagagcggacttgataatatttaccgaataaacgagaagaacgccctttcctttgtccgatggaaccagagggacgaaaaaatagaggataccgatgagggacatgacaataaacttcaaagtggttttaattgctggtttgctgttcatatatatacccatcctttcaatcaagaaaatagtatctttggccggttggcctaatctggaagctcaattgtattttcatctgtattaatctttaccgtcatgccgttttcaagagccaggcagagggagtcaggaacttcgcataccatgggaatttccatgattacggcggcagataccaggaccgtatcgaggttttgaacgataaggccggccggctgcataccgctttgttctaatttgtaaaggccgtcagcctgaacaacagaacttccttttccgccgggaaataccaggattttaccggcaatgctctgtccctccaggcagtggccgtgttctgtaatccggccggttgccgggtcggtaaagtaaaaaaggatttcttcggaggagatgacggcttctccttgtgcgttccccggagaaattgtcttacagggatagaaacgagccatttatgtacctcctttgacagcatgctccagacagcattccgtactcattacattaatatgtgcctgaaaagatgccatataataagcgcattttggagaatcgctcaagcctgttttgccggatagaaaaccccatacaggggactcgtcaatacaggtatcagctatcatctgcacattttttctttttaattcatcgtaaacgcctaagctgcgcgcaagagtgatgacatggcgggaggtcaggatccagacgggaatcacagccaggcggcttttcatgaattcattaaccttcaagacctgctcataagtataatgagggcagccaagcattacaaattcggccggtgttttgttacttgcagcataatcctccctcaagccgtccagatcctgctgggtgattgtgacagtgtgccggggcggcttatagcccgacgcagcctccggggtaggggagccgggggtgataccgggaatatggaacatctcatatgaacctgaaacattgagctgggtaccgagggcaatcagctgttctgtggtgggatcgaccgggaggttcagaaaaacaggtatgcccttgcctatttttttgcccatcattcccagcaaagagtaggagaaatcgtccctcatatcggcttccacgtaaacagcggtatctgcaaaacggttatcatcaaggagcatcccatactcaggcgtaaagcccgtaatggcggcgcaaagggcggtagcggcgctctcacggtttgtcttcgctccgatcactgagttgacaaagatcgtagcacttgtctctgaaaaagcagtgatttccccccgtataggaatattttcattcagataaggggtacagctgtaagtaagggaagcgcccaggcttcggtaggcatcttccgtccgcttcatgttctcttcggcatcaggagacagcatagagcggcttttgaaataacatacggaatatccgggattgacagtgggagcgacggcgcagacagctccggcctgaaccattttttcggcaaaccagatatcggcgccctgggcgctcagagagacatggacgcgtgtaaccggcacaaggcgcacagcgcggaaactttctcccacagcggtaagaatccgggcggccattgccttgcctttgccgtattttccatccagcatatcacgctgggtatctgttaatagcataatcattcctctttccgaagtctattttgttaccagatttcccgtttcaggatcgtagccgctgtaaaaaccatggccggatttcatgccaagcctgcccgaatcaatcagggctttcagctttgccggaggcttgtctctctcatcccggcttacgctgtaataagaattttcgattgcatagacagtatccaggccaatcaaatccataagctggaaggggccgatgtttgtatgccattccatcatccagccgcggtcgaattctgagggggtgatatatccctcggcccataggtacagacactctttttttacggctctccagactctgttaatcgaatatcctttgatttcccgctccgttatgatcggctcgaagccgagggtgcggtagtgggagagggccgcctgtttcgtcacctcgctggtactgggattccacatcatttccagataatcattgcggattggatcgtcatgatccaccgaaaaagtgagggccttcctctcaggagatacgaaggcacagatatcactcatcaaaagggatgaagtattagagttcagcagggcatccggcgggcataaggaatccagcttccgaaagatttcctgctttacttccagcttttccggtacattttcaacgacaagctgcgcatttttacaggcgtcttccagactttcggcataagaaattctttgttcggctgcgtcggcttctgcctgggataagcgtcccgtctcaacataataattcagccatttgcgtattttgctgcggcatttgtcaatggaggtccgggtacggctgtatcctgtgacctcttttccgtatacggcattgcggaaggcaatcatggaaccctgagttccgacgcctacaatcgtcacatgctgtattgtgtctctgacttgtgacatgtttgactcctttcatactgggtgaatagtttcgatatagttttatagagcaagtttcatgccaattaaaatacctacatctatcgcggatttatcaggttttggaacatctctgtaataaaacgcaataaaatagcactgtaacattttattacagtgctattttatcatacagctaagcggaagggggtttatggggcgatgatatttgcagccgtttcatccgtgccaggagattttgtctgctgatttggaggatacgtgcagaggaagagatattccagttctctttttccaaggtctggatcagcagttctctctgatacgtttttaagatttcagtcagaccggagaccggttctgaagtaagttctttagctgcctctttaacaggttctgcagccggtatcctgtgaaacgaagattcactttgatggcgggccggggctctccttgtaacgaccggaaggtcttcgagggtcagggtatcgtcaaattccgatgccttcagcatcatattttgaatcgcatgctgcagctcgcgagaattgccgtaccaggcccggttttgcatccaatgaatcaactcgtcggaaaaatgcagaatatttctgccgagttctttgttatattttttgacaaatagaaggctgaggctgatgatatcttccgggcgttctctgaggggcggtatctccaggcaatattcggagattctgtaatagagatcgggccttaaacggccctcgtctaaaagagtctgaaggttttcgtttgacgcgcagataagtcggcattgcaccggaaattcttttgtactacctaccgggcgtacacatcgctcctgaagtacacgaagcagcttcgtctggttcaggggagtcagtgaattaaattcgtccaggaagagggtgccttctcctgcctcgcggaacaaaccgatattattaactgctccggtataagcgccttttactgtgccaaacagcgtactttcaaagagttcggccggaatcgcagcacagttgattgcaataaatttatgacgctcccggccgagattatgtatactttgcgcgaggacttctttaccaactccggtttcacctgtgattagaatagacatattcattgttgaaacggcttgtgcttcttttatgatttcgcgcatgatgggggaagttccggtaatatctgcgaaggtatatcgtgttccctctgcgatattaactggatctgcttctgcggctgcatcggaaagaatctgacgtttgtgttctaatagtccataaagcagtttacgcagagtgtattcggttcggcaaatcgagtagacgccgataatttcaccatcttttttgatagggacggtatcataattaatatagacgggagcctggcccacaaaggcatggggtctgtaagcgttaaggattgcttttccactgtccattacgcgccggtgttcagaggattcccagtcggaatgttcataggcaagccaggagatttctcccagagccttgccggcatccatgtgttccatctctgccttggccggattgaaaacggtgataatacagtttcgatcagtgagaatgataccttcatgaatattttggataatggtttcaagacaatatattttttcttccagctcccgaattttctcattttgtgtgtttttcatctgaattcctccctccgtctagtatataggaaagagtataggtgatgtcaatagaaaatttaattgagaatgggggacgtgtcaggaacagaccgggccttctgctccccgaaggaaaagcgcacccttgtgacttcgtcatcctccgcgggttcgagcagctatacatgggcattgatgcggacggagagtgccaaattcctgagaagaatccctcagctgtatacgtaaaaagacaggagaatctgcttttgattaagcggcttctcctgtcttgactgtatcagcagtttttctgaaatgtatgtcccatataataggataattcggcggcgctgtgtttaacctgctcctcaagatgatgaaggtgggtgtcgtccgccactctggagtagggggcgatgatgccgaccgatgcggaaaccctgccttctatcccgaaaataggagcgccgattccgaccgcatcgtgaacatattcaccgtgggatacggcaattcccatctcccgtattgttttcagttcggaagccagggcaccgcggctgatttgcggaaacgattccggccggtccagaatattgttcagataataatcgatatatttcggctcctggtaagccaggagtactttgcggatcgcgccgcagtggagatccatctcatatccgaattcctccacaaccttcagatggttaggcccgtccatcttatccaggaccagccctttgtcgcccacctgaataatcagataggaatcttccctagtattataggaaagattcttgagaatcggcagtgcggcttcctgaatacggacattgttggcagcggcccgcccaagtgaaatcaatgcgggacccaactggtaggtatgggcatgctcatcgcggatcacatatttcttttcgcagaacgtctggaggattctgtgaatcgtgctgggcggaaggcctgtggcttccgacagctcagcaatggagtatttatgatttgtctctttcagaagctccagaagttccatggagcgaaggaggctctgtatcatgtgtgctgttcctccgtcttattcggtcatctcttcaacagtcacggtggtatcggccgggatgtttttgtcctcctccacggaaacttcagcttcttttctgtcttcggcttcttcaggaactgactcctgttcaccggaaggtgtctctccggagagagcggatacttcttcgtctgccgtcacatcagacccttcatcgttgcggccgtctgttgcttcctcattcttcctgtcaggggtaagggaaacataattgcgtgttacggtgctgctgttatcgtctgtatcttcaaattcatcaaaatcatcttcaaaatcgtggaactcttcatccagttctttatggaacgatttgtactgtaagaaataggagattcctgccgcagccgcacccgcaatagccgcaaatgctaaaaatcgtccaaagtgtttttttgccataataagactcctttctgtaattaagcttattgtaatacggatttactaaaaaataaagggattctaagaataaattataaaagatgtaataaaatagcgggtgtaacactcagaataagccgggtatattgcgccaggaaggtataaagctttgaaagcccgggctttggcgtgtagttttagagggacggaattttaataagaagaaagactgtaacagttcagatggggagattgctgaatcttgattggagatttaactgaggtgtgggggacgcggccggaacggactatgtccggtgtggtgagggggctggctgagtcttccggccccgtgggtaggttgtcgtggagggggaatccggccggaatgaattgctgcggggaccgtttgcactctttggagtgcgcatcggtgctaagctcgtaagggacctcgctaagcaccggaggactcccatgtcccctccgcaattgattccgcctccttcccccggtcaggttttcgccggggacggaagactcaggcaaaggttttcgcgacaccggatatggtccgttccggacgctgattgtctccaaccttaaatggggagggccctgtcgcggccactacgtgttgccgcaggcagatatcatatcttccgcaattctttaaaaaggcgcattgaaggcatatcgtatctcgcatacccggtagcactgagtgtccgcgacaaggtccgccctccgccccacactacgacaatcctcccccaggacgaaagactcatatacacaccctaccaccccgtccgctggccgtaccggcggcgtcctcacctgcttaacgaaatgacatgataccagggtcaaaaggttggaaatctgatgcaagcttgcttgcatgaagatttttaatcttgggacccgccaaaaacatgagtaagaagccatttttcgcagaaaaatgagcggattgcgaatgtttttgaggattgtgagagcacgcagtgcggagcaatccggtatcaaaggggtcaaaagaccttttgaccccaacatcatgacattgctgtctgaactgttacgaaagattgtaaaaaatatataaagttagcactcaactattgacagtgctaacaaagcgtggtataacttgttttgtaaataaaagtaacatattaccaagtacattttgaaaaagaaaaataaaaacaagacaaaacagtaaggaggagtcagtaatgaaattagtgccattatttgacagagttgttttaaaacagttagttgcagaagaaactacaaaatccggtatcgtgttaccaggccaggcaaaagaaaaaccgcagcaggctgaagttatcgcagtaggcccaggcggagtggtagacggcaaagagatcacgatgcaggttaaagtcggcgacaaagttatctattccaaatactcaggaacagatgtggagctggaagaagaaaaatttgttgttgtaaaacagaacgacatcttagctgttattgaataaatagtagaaactaaaaagacataataatttggaggttgatgaaccatggcaaaagaaattaaatacggcgttgatgccagaaaagctcttgaatcaggtgtaaatcagttagcagatacagtcagggtaacactcggaccgaaaggaagaaacgtagttcttgataaatccttcggcgctccgcttatcacaaacgacggtgtgacaattgcaaaagaaatcgagcttgcagatgcattcgagaacatgggcgcacagctggtaaaagaagttgcaacaaagaccaatgatgtagcaggcgacggaacaactacggctaccgtacttgcccaggctatgattaatgaaggaatgaaaaacttggcagcaggcgctaacccaatcgttttaagaaagggtatgaagaaggcaacggaaaaagctgttgaagcaatcaagggaatgagcaaggctgtaaacggccaggcagatatcgcaagagttgcagctatttcttccgctgacgatgaagtaggccagatggtagcagatgctatggagaaggtttccaaagacggcgttatcacaattgaagaatccaagaccatgaagacagagcttgacctggttgaaggtatgcagttcgacagaggttacatctccgcatatatggcaaccgatatggaaaagatggaatccaacctggacgatccgtatatcttaatcacagataaaaagatcgccaacattcaggaaatccttcctctgttagagcaggtggtacagtccggcgctaagctgttaatcatcgctgaggatatcgaaggcgaagctctgacaacactgattgtcaacaagttaagaggaaccttcactgtagtaggtgttaaagctccgggctacggtgacagaagaaaagagatgttaaaggatatcgctatccttacaggcggtaccgttatctcagaagaactgggccttgatttgaaagacacaacaatggatcagttaggccgtgcaaaatccgtcaaagtacagaaagagaacacaatcatcgttgacggcttaggcgagaagaacgaaatttccgacagaattgcccagattaaagctcagattgaggagacaacatctgatttcgacagagagaagcttcaggagagacttgcaaaactgtccggcggagttgctgtaatccgcgtcggcgcagctacggagacagagatgaaagaagcaaaactccgtatggaagacgctttatccgcagctaaggcagcagtggaggaaggtatcatcgcaggcggcggttccgcatatatccatgcggcagccgaggttgagaaggttgtttccgagcttgacggagatgagaagacaggcggacgcatcattctgaaagcacttgagtccccactgttccacattgcggcaaacgccggactggaaggctccgtaattattaataaagtaaaagaatctccggttggagttggatttgacgcatataaagaagagtatgtggatatgatggaggcaggtatcctggatccgaccaaggtaaccatcagcgctctccagaacgcaacaagcgtagcgtccacactgctcactacagaaacagttgtagctaacattaaagaagaaacaccagctatgccggcaggcggcggaatgggaatgatgtaattcacaggtaccatccgttgtaacaacagcaggtaatataaaaggaatgcagaaagcggaggcttaaacgtctcaccttctgcattccttttttgattgatgacggtgacctgtgcgcggagcgtgcaggttatcgtttatagaagcagcagataatttaatgtataaacgtataacatatgaaactaacatccttaagggaggatattcccggctatgaacccggcgcagctgtgaagcggctccagcgctgtatccaggacggacataatcacagagctggaggcgattatgctgacggtgccgaacagtgtattgtcctctttcaaaataggaacggcaacacagctgatacccaggcctatttcttcaaattctgtggaataccctttttgatcaatcgtatcaagctccgcttccagggcctcacgggttaatatggtgtttgccgtataagggaaaaattccatccgtgagagataatactcccggagaggctcatcaatgtattttaaaaacagtttaccggaggcagtggcattgaggtcaaaggtaagattgatccggctgttcaaaatgtaatgggagtgatcggggcttatattttcaatggtaaatatattattatttgtgataacctgcagcagggccgagacctggaaccggttggcaatatctttgagacgcggggcggccagggttctcagccgttttatattattgcctgtcgcaagatccgcttttgtaatataaaccagcccaaggcaatatgtatttttttcggcgttgcaggccagatagccgttggctaccagtgtattgacaattcctctggtggtattaatatgaagtttaactttttcgctgatttgcggcagcgataattcggtattgtcgttattgaagcagtcgataatattaaacgccctctggattgactgtatcaggcgcacttctttttccatatgtaaaaatcctcccaaaatgtactgtattcaatcttacatgaaattccggtaaaaagcaatcgccctgatttaattaagcaggtgaggacgccgccggtacggccagcggacgggatgatgggggatatgagtcttccgcccccgtgggaggttggtcgtggagggggaatccggccggaatgaattgctgcggggaccgtttgcactctttggagtgcgcatcggaatgctagtgcgcccagaaagggcgtgatatttaacaggtggaaatcctgtccggaaaggtgctaaccacaccaccggtagcgagtcttgagtcggtagcagcaatgctgccttctaagcgtagacagtcaggtaacagggctgaaagtgatagagtaccgaaatcgatgcagtccggcaggccgacgcttttagcatagcggaaggcaacaggtgggtttatcgcaatggtgagatttcacacactgccgcggtgtctgagagccagccacgttacacaatgatatcacgtcaactggggagagcctgtcccctcccgtgggaagtgtgttcccatgggtatgccggacgcgaggaaggcaaaaggggtgcaggcagtcggatggccggatagtaccggagaaagcgggtaatgccgccggagggaagccgagagagggcatcaatcctcaaagccctgccatataaggcaatatcaaagaggaaacatcaactatacacagaggtagacctatgatggaaacgaaattggagagaatatcgcagttatcaagcgaacaaccggagttggtattcacatccgtcgggcatctgattaataaggaaatgctgaaaaggtgccacgaacaaatggatggaaaaaaagcggcaggaatcgacggaataacgaaagaagactacgaaaagaatctggaagaaaatctggccagactggtggaaagcctgaaaagaaaggcatataagccaaagccggccagaaaggtagagatacctaaagaaaacggaaagaccaggccaatcagcatctactgctacgaggataagctggtacaggagggactgagagaaatcctggaggctgtgtttgaaccacagttttatgacaacatgatgggattccgaccaggccgaagctgccatcaggcgctgaggaagctaaatcagatgctggaaagagaaaaaacgaactatgtgctggatgcggatatccagggtttctttaatcatctggaccataaatggatagaaagatttgtggaatcaagaatcaaagacccgaacatcacgcgtctgataagaaggacgctgaaagcgggaatcatggaggattatgggtatcaggaaagtccggagggttccggccagggaagtgtgtgttcgcccatcctggcaaatatctatatgcattatgtactgttatggtggtttgaagaaaaagttaagccgaagatgcggggatactgtggtctaatcgtatatgccgatgattttgtagcctgtttccaatataaagaggaggcagaagaattctatagccgcttgaaacatagaatggagcacttcgggctgagcctggaagaagaaaagagccgtctgatagaatttggccgctttgcaaaagaaagagcagagcgtgagggaaagaagacgggaacctttgactttctgggctttacacactacgtttcagaaagcaggaacggaaagttccgggtgaagaggaaaaccagcagaaagaagctgcaaaagaaaagcagggaaatccatgcgcaaatcaaaaaggagcgtcataaggaaatttccgtgcaggtgaagaagctgaatgagatattagttggatactaccattactatggactgaccgataacagccggagtatcggcctgttctaccgggaggtagaaaagacgctgtacaagtggctgaaccggaggagccagaagaaaagttatacatgggaagggttcagggaaatgatgaagcagcacccattggcgaaacctaaaatctatgtgagtatatacgcttgaactgacgaacaatgaaccttataaagagccggatgcgggaaatccgcacgtccggattctgtgaggggtatgccacgtaaggggcatatctactcgacagctcgagaggacctcgctaatcagcgatggatttcaacggcatccgcagactttatcttcccctccgccccaagggaaggttcgccgggacgaaagacatccgccggggtatcggccccgtccacaggcctgcggccgctgattgtctccaaacctaaatggggagggccctgtcacggccactacgtgtttccgcaggcagatatcaaatctagcgcctttcataaaggcgcaatgaaggcatattcccgtcgataaccttccggaagatgtcggcagtatctccttctcctgccagcaatgccacttcccccgggacgaaagactcataaacccaccccaccaccccgtccgctggccgtcccggcagcgtcctcacctgcttaactacaaagaaagcgattgacaagttgggaaaaagataataaaattatattatagtctaaaaaacgataatatagtgaaagcgagagaaatgagagaggagagaggaatggatcaaaaagtttacgatgcgtatctgtcaatattaaaagcagaactggtacctgccctgggctgtacggaacctatcacaatcgcatatgcctcagccattgccagagagtgcctgggcgcttttccggatgtgatacaaatcaaggccagcggtaatattattaagaatgtaaaaagcgttgtggtacccgggacgaacggcatgaagggaatagaagcggcggttgccgccggactggttggcggaaaatcagagaaaaagctggaggtgatcagcgaagtcacggaagaggaaaaagagcagatacgcgatctcgtggagaaagagataatcgaggtggggattgccggctcggatctgctgctcgatgtccaggttcagcttaagaaaggggacgattccgttttcgtccggatcgcgaatgcccacacgaatgtagttctggttgaaaagaacggagtgcgcctgtttgagaaagcgatggactgcggaggggacgacgcgggcctgagtcaggaaaaaaagcttctgtctgtggaaggtatcctggaatttgcagaccaggtaaagctggaggacatagaagatgtgatttcccgtcaaatcgcttataatacggcaattgccgacgaggggcttgcccataattacggtgcgaatattgggaaggtgctgcttaaggcatacggggagcaggatgtgcgcgtccgcgcaaaagcaagggctgcggcaggctccgatgccaggatgagcggatgcgagctgcccgttatcatcaattcaggaagcggaaaccagggaataacagcttctgtccccgtcattgaatatgcaaaggagttaaaatgcggggaggaaaagatgtaccgggcgctggttttatcaaatctgatagcgattcatcagaagacgggaatcggtcctttgtcggcttactgcggagcggtcagcgcaggctgtgccagcggggcggccattgcctatttaaacggcggggatttgaggacgatctcccatacaatagtgaactgtctggcaatcgcttcgggaattgtctgtgacggagcgaaggcgtcctgtgcggcaaagatcggaatgtcggtggaggccggactgctggggtatctgatgattgaacaggatcagcagttccgggccggggacggaatcgtcaaaaaaggcgtggaggagacgatacgttcggtcggccgtcttggcaaagacggtatgagggaaaccgaccgggaaattttagagataatgataggaaaataaagtctggataaagagtaaataaagacgaaagaaaggagacgcacagcttggaaaactacggcacgaacagaatgggcggcgggcacaaactgctgcaggacaggctcaaaacggagattgagacattaaagggcatttcggagccatgccggtgcggtaccacacgccagagctactcggcagcatataaggaggggacggcttacataaaaggagtgatggaggactgcggcctgacggtccacgaagacggagtgggaaatgtcatcggcactttgacgggcacggagccgggactggcgaaaattctctccggttcccatctggatacggtcagatgcgcgggggcctttgacgggattgcgggagtcgtatgcgccgctgaagcggccagattggtcagagagagcggcatgcctctgcgccacaccttccaggttctgggtatgattggggaggaaggcacacggtttggaaaagcgcttttgggaagccagtttatagccgggatttatggagaagaacagctcgatgaatttatcggtatagaagacaaaaaaacaatgcgccaggccatgacggaatacgggctgagcggagatcttaagggggtatccaggaaagaagatgcggtcaaagcatttctggaaatacacggtgagcaggggcccgttctggagcaggaggaaaaacagattggcgttgtggataccatcgtcgggctgtcgtggcttgttgtcaaagtgaagggacaggccgggcacagcggaacagttccgatgaaccttagaagagatgcgggaaccggcgcatttcacctgatctgccggattcacgattatgtatgtgatacgtattcgggcagagcgacattgacggcggggcaggtatcgcttttgccggggagcatgaacagtattccgggagagtgtgaattttctctcgatatccgctcaggggaagaagaaatactcagggatattctggaacatctcacagaatttgccggagaggtccgggagaaatatgccctcgatgttgaagtgcgggagctgaccagaaaagaacctgtaaaaatgaatgcagctctggccggagggattgaagacgtctgtaaggaactggggtttacgagcatgaggctgaacagcggcgcaggccacgattccatgatatttgcaaagctttgggataccgcgatgatttttctgccgaacagggatggaatcagccaccatccggatgaatggatcgattatgaggccatggcggcgggaagccgcgttttataccagatgatcagaaaattagatgaggaggattaagaagatgaaggacaaggatttagagttggagccggttgacatgtatgtacttttcgctaaaatgttttcccacattacaagggaggtggagaaagcctgcggtgaagaaggtgtgagagcagtgagggaaggcgtccgccagtttggcttagagcgcggcaggaatatcgcggagcgcgcgaaggccatgggccatgagaacgatgcgaagagctatcttccctgctatgatatgggaagaagcgagctgtttaacagtgaaaacgatatcagggaagattccatagaacagctctttaccgaatgcatctttgcaaaacagtggatggaggatcacgacgaggcatatggaatccattactgcgagatgattgacccgtccatagcggagggctataatgagaacttcaaatgtacccatgacaaacatttctttaaagacggctgctgtcatttcctgtttgaaatgaagaaataatcgttacgattcacggccccgctgaaaagcggggttccgcgaacagtaacacgcttcgcgaaaataatcctgccaaaggaggcaatcgtaagatgaacaagactcatagaacctatgattttgaaacaattctcgaccggtccggcaccggctcggtgaagtgggagcagatgaagagtgataatcccaatgtggaggaaggaatcgtaccattctccatcgcggatatggagttcaagaaccctccggagattacggaaggcttaaaagcctgtctggatgagattgtactgggataccagactccggaagacagctacagaacggctgttacatcctgggtaaaacggcgttacggatgggaggccaggccggaatggctcataaacaccattggagtgatcaatgcattctgctgcggtatccgggcttttgccggagaaggggagggcgtcatcctgatgactcctgtttatccgccttttgccgaaggaatttgtaaaaacgggagaaagctttaccgctgtcccctgatatgccaggatgggacttacaccattaattttacgcttttagagcaattggccgaaaaaccggactgccgtctgctgatactctgcaatccccataatccggtgggaagagtctggacccgggaagagttaatgagggttggcgagatatgcctgaaaaataacgtttttgtcatctcagatgaagtccactgtgatattatcatggaggggtacaaattcacctcttttgcgtcggtttcggaagagtttgcagaaaactgcatgatctgcctgtcacccgggaaaacgttcaatctggcgggaatcaagtcgggatgtatatttgtgaggaacggggaacggcgcagcgctctgcttgacgagatttcaaaagtgcttcatcccaactggctgccggccctcagttaccgggccgtggaaatcgcttatacgaaatgcgatgcatggatgggtgaaatgctggcagtgctcaatgaaaacaaggagatgcttgtgcagttcttaaatgaacgcctgccgaaagtacggcctgtggaaatggaggggacttatctccaatggcttgatttcagggcttacggctgggatatcaaagagcaggagcggattatgcagcaggaagcccagcttttctttgacgaaggataccgctttggagaagagggggaaggatttgaacggatgaatctggcctgtcccaaagcagttcttctaaaagcgcttgagcgcctggagacggttttgcggcgttatgaatagatgacgcgtaaaatagaaaagctaaatagaaaaatataaatagaaaagaaaaaaattgaaaagggagcgccgcttaatggcatgaagtcacaatgaccgaatgtcaggagcggcgctctcttttgaaatgattgcaaaaataattgcagtcatgtttcaaacaaatgaatgcgcagggccgatatctgaggtatactataatttaaggcgtaccggacgcccggtacggtaagcggcaatcctgcagatgttacaggtgccgcgggaaatcatttaatattgcaacaaataacaggaaacgacagaagaaaagttataaatgaaattaaatgcaattttaaatgatttattttgaaattatttgtaataaatattgcaaaagattgcaatatgtgataatgtatatcacaggaaggagaaaattatgacacagttcacaacttcaataccggcgcagaggcagcagcagatttcggattatctgaaatcgaagttcagcatctcaatcaaggaggcatcggagctttgcaatgtctcggaggcgacggccaggcgcgatttggatgacatggcggcggccgggcttctggagcgcacacatggaggggcggtgcttcataaggggacgggctttgaagagtatcacgatgaaaagatgaaggccatgataccggaaaagacgaggattgccagagaggctgtaaagcttatcaaggacggagacagcattttccttgattcaggtacaaccacacttcttttgggacagcagcttgaaggcatcaagaagctgacggtggtgacgaataatctggatattgcttcgaccgttaagctggacaattcttccacaatgatagtgacgggaggggtcagaagagatggttacagtgtactgataggggatatagcggaggagctggtcagaaaattgtatgtggatattgcttttgtaggggccgatgcggttaattccaagagcggtgtttataacagcaattttatggagataggaattaaaaagagtatgatagccagcggcaaaaggacggtgcttttagccgatcacagcaagtttaagcagaaggcgctggccaagatatgcgatatagaagaatttgatacgatcattacagattcgggcatcgaaaaggagaccagggaatatctggataaaaagataccccatctgatagttgtataaggaggatacggatttatgagttggctgaaagaggtaatcggaacagagaaggcgattatatccatgctgcatttgcaggcaatgcctggagacccctattataataaggaaaagggaatcaaatgggtggttgaaaaggccagggaggatttagacgctcttcaggaaggcggagttgacgctattatgttcagcaatgaatacagcctcccctatcttactgaggtaaagagggagaccgtagctgcaatgggaaggatcatcggcgagctccagccatacataacggtgccgtatggcgtgaatgttttgtgggatccgaaagcctctctcgatttggccgcagccgtggatgccaaattcataagagagatatttaccggagtatacgcaagcgatttcggactctggaacacctgctgcggggaggtggtaaggcatcagagggagataggagcggagaacgtcaagcttttgtttaatatagtgccggaggcagccagatacctggccgacagagagatcaggcagattgcgaaatcaacggttttcaactgccgtccggacgcactctgcgtatccggcctgacggccggctcaccgaccgatatgtcgacgctccgggatgtgaaggcggaggtgccggatacggttgtcctggccaatacgggctgccggaaggagacaattgaaggccttctcggcatagccgacggagcggtggttgcaacgacctttaaatatgacggtaaatttgaaaaccaggtggataagaaccgggtgaaggaatttatgaagatagtcaaagattttagaggagggaactgacatgatatcagcggatgaaatttatgacagtgcactgcacacctttgccaacgaagccaatgcagtggcaaaactggccgatacggtagacagggagagctatgtgaaagccgtacggatgattgccgaatgtgaggggagaatcataacgacaggctgcggaacttccggagcctgtgcaaagaaagtatcccaggtattcaactgtgtggatcgggcatcccagttcttaaatccggccgatgcgccccatggagattatggaatgatccgcaggggagatattattatcattatatccaagagcggcaagacaacggagatgataaatctgattccggtggcaaaggcaagaggcgccaggattatcactgtaaccgagaatcccggttctccgattgcactggagagtgatttgaacctgatactcagcacaggaccggaggcctgcccttaccagtgcctttcaacgacatccgtgacagcggttttcgctctgtttgatgcaatatcaattggatgtatgctgtataacggcatcgacaagaattattttaaactggtgcatccggccggcggggttggtgcaatgcttgcggcggaggaatgacatgatgaaattaattgtaaccggcagttatgaagagagcagccgcattgcagcggatatgtttgaagaggttattattaataagaagaatcccctcctgggatgtgcgacgggaagcacccctatagggctgtatcagtgtctgacagaggactaccgggccggaaaaatcgacttttcaggcgttcgtaccatcaatctcgacgaatacgcaggtcttacaaagggccatagccagagttttgggtattttatggagcagcatcttttttctaaagttaatattaaaaaggaaaatattatgctgattgacggggcggcccaggcggaggaccagtgcagagactatgacagatttctggaacagaatgagattgacattttagtacttgggatcggaaataacgggcatatcggctttaacgagccatcccatgtatttacagctaaaactcatgttgtggagcttgaagaggagacgataaaagcaaattcccgctttttcggcggagaggatgaagtgccgaaaaaagccgtcacgatggggatggccgggattaccggagcaggaaaagtagttctgattgcggccggagctgccaaggcggaggcaatcggaaaattacttgccgatgactatatcgatcccatgctgccgtgcagcattctgaaaatatgcagggacgtaacggtgataatagacaaagaactggaggcggcgatgcggtgacggcacaggcccggttcattacataacggagagcatgaaatgggtaaatacgtctttggatatgattttggaacactctcatgccgcggcgtagctctcaggctggaagacggaaagctgatggctacggcagagagcagatataaaaacggagtaatttccggcatgatgcaccacaaaccgatcccgcttgaggatgaatggttcctgcaggatccggacgactggttaaacagcatgtgttccgtgacagaacagatgcttcatgaatcagggataccgccggaggatgtggcaggtatcggaactgattttacaagctgcaccatgattccggtctgtcaggacggcgcgcccctgtgcaagaaggcggaatttcgtgacatccccaatgcatggccgaagctgtggaagcatcacggggcccagaaatatgccgaggagatagaacggtacgcaagggaacacacggactggctcagggaatactttggaaattccgtttcatccgaatggatgtttccaaagattatgcaggtggcaaaagaggaccctgaaatataccgggcaaccgatttgtttatggaggcggtggactggattgtctattggctgacaggaaatttaaagaggacaggaggcattctcggggtgaatgcattctggattaagggcagaggatatcccgacaggagctttttaaaggcccttgatcccatgatggaagacttggttgagacaaagttcgcaggtgagattatcgatgtcggagatcttgccggccatctgagcagcagggcggcagaacggctgggccttacggaacatacggcggtatctgccgggcacagtgacggagccgtggcgggctgcggagccggagtcacccgaagcggaagcatgatgctggtgatggggacttctacctgccatcagatgatgtgccgggactttcattcatttgacggcgtgtgctcggtggcggcggacggcatggttccggggctgtatggttacgagtcggggcagcccgcaacgggagatctgtttgaatggtttgcggggaatgcggttcccgggaatattatgaaaaagccggggaggaaggaaagagcatcctggagtatctgggggatctggctgcagaactggaaccgggggaaagcggtctcattgctctggactggtttaacgggaacaggagcgtactgtccaactacaatctgtcgggagcgataataggacttacgctacatacaaaaactgaagaaatttaccgggcgcttgtggaggcaaatatattcggttccaggaaaattcttgagaattataagtataacggcgttgcgattgatgcgatctatgcggtcgggggattgcgcggaagagtccgtggatcatgcagatgtgcgcggacatattccatcaggaggttatagtgcctcagatagataatgtgcccgccagaggcgccgcagcctgtgcggccgtcgctgtgggaaaggaatgcggatatccgggctgcatggattttggagagtcgtcagagcgtctgatcccgggggagacgcttgtctaccgtcctgatggcgcaagaggcaggctgtacgatgaattgtattgttattatgggaaattacatgatgttttcggccgtgatgattcctttatgaaaggactgaggaatatcggaaagagccggaatgtttaaatacaaagcattctggtgatatgtcaagaactttttgaagaagattttgatatgtttttcagaaaaaagggtaactttaacagaccttcggtatattttacgtataaccgaatgtcagttcgactcaatattatattcggtgtccagcttttcgccggtgtacagttggtttttgaccagcaatccaaaaacgagtcgtactaatttacgagatgtaagcgcgagtgctcttttgtgctgatgtttggttacctcagcatattttctggcatagaaatcagcatattcagggatgtgcttcctgacgctgtttgccgcttcgccaagatagcagcgaagatagggatttccggctttcgacattttgttgtcctcagaagtgaaatctccggaatcacccttaggccagtaaaggccggcatatttggcaagggcatcggatgaatggaacacggttatatcgcctatttctgatagaattccggatgcccatatcggacctattccaggtatggattgaaggatgagcagggcgttagggttcattccgttgatgcatttctcaatcgcctgctcgatcagcttgatttctttctgataggcgtggatgcagttaaacgagcttgccagtgatatgctcagtggttcatacatgcacttgtctaaccggtaggaatccctggctgccttgcgcaggagttccgaagtttttgataggtcagagatgcggttcctgctcttccccgcaaggaaggtaagcagatcctcttccggcatatcgataatctcctgcggagacaaaaattccgtcaggacagctgaggacgtggcaccatagagactgccaaaaggcttgtcatcaccttcaaggagctgaagttcactgaacttcagataaagattcgaaaccatataagtcttctccctggtgatgcactcagaaaggtgcatacggtgccttgtaaggcgtttcagggatatgaactgcccgccgcgccatggctccagttttttcgtgcggcctaccctgccgaagtccgcgatgagatatgcatccgtgggatcggtcttttccattccgatataggattttcggtaattcgaagcggcctttgggtttacacagaatacgtaaggcctgtagggcatgagaacctcgctggccgacaggaagtttgaaatatgcacgctgtatacagaagtagattccagcacgataagaaccgtatccaggtttttatgcttctgcatgcattcggcaatcatatttacaagctgatcggcgcctggctggttattgccaaacgacgatgagatgtatttgttttcctcaaagtccatggcatagacggcattggtctttgagcttacatcaatacctacaaacaaggtggacatatagttgagctttaacatgatatcacctccattccgatggggatttgtgaagcctgaagcaaaaggtttatcctgtgccgcatacggtgaccgaaccctcgcgcaatgagcatgcacccagtcagccttttttgctggggctaacggctggggatgaaaattctgtgtcagcggaatgtgccgtatgtgccaggctgaatgctttcaaagcagtctcggacgaagccggctgaaaggaggagaagcagtgccttcggacatcagactctacctgatatcataccacaggatctacctatattgaaatgtaactatcaactgtatagatgggaatcgggatgaggggagtacctcttagatatccttaccatttatacccaaaaaagaataagtctgtaagcggtttttcttgcttacaaacttattatacgaggaggaactatatgaagagaaggttattatcggcagtgatggttatttccctgaccgcagcttccctggccgggtgcagcagttcacaggcaccggagacaaaggcggctcaggaggcggcaggggaagtaaaagagggccagtcggaagcagggggagaaaatgcagaggcagcggaagggaaaacatatacaattgccaccgttgtgaaggatatgtcggatccgtggtgtctgcgccatcaggaaggcgttgacgaatacgcaaagacgacaggccacaactgttatgtaaaaggcccgtcaaagacggattccgctgagcagatccaggtaatcgaaacattgatagaacaggatattgacgccatctgtgtggttccgatcgatccggaggcgtgcaaaccggcccttgccaaggcgcgggaaaaggggattgtggtaattacccatgaagcggaaggctttgatgcgtgcgactatgatctggaagcgtttaacaatactgagtacggcgaggccatgatggatgagctggcaaaggcaatgggcgaagaaggacagtatgtcacaatggtcgctttcctctcatccacatcccacaaccagtggatggacgctgcggtagctcatcagaaagccaattatccgaatatggagctgattccggaggagcggattgaatgcgaagataatatggatatggcatacaacaaggcgaaggagattattaagaaatatccggatatcaagggctttatcggcgcatccagctatgacccgccgggagctgccaaagcaatcgacgaactggggatgacaggaaagatatttgccgtaggcaccggagttccgtccgtatccggcccttatctggaatccggttccaacccgtgcgtactttgctgggatcctgctttatccggggaagcaatgtgcgaactggccgtaatggttctgaacggggagaaggacaagatagccacaggttataatcttggaattgaagggtatgaaagcattaaggttaacggcaccgacataagcggcagcgcaatccttacaatcaataaagacaatatgggagattatcagttctaaagcagccgcgctccggcgcagactctctattcggcactctatgatatcttcagaatttatgcttgcgtatccaaaacagccggatacgcaagcattattgatagaggtgaaaggtataaaacaccgttgtaactgcaagacttttcagtgctgtgaacggtaacggaataaaacaggggcaggtggtagaatgaacgaaacattattggaagttaaagagatatcaaagcattttggcggagtgaaagctctcgataaagtgaatttgtctatcaaaaaaggggaaatccattgtctggtcggggaaaacggctgtggaaaatccacgctgattaaggtgatttcaggattttataaaccggacggaggagagattatttatgacggaaaggcgtataaaaatctgggcatcaaccagtctatccagcttggaatccaggtcatctatcaggatatgtctatttttcccaatctgacggcggctgaaaatattgctttgaattatgagctttataataggaagaaaattgtaaactggaagaacgtatacgaggtggccaggaaatcgcttcggcatatcggaatcgatattcccctggatgccacggtcggctccctgtccattgccgataagcagctgatcgcaatagccagatcaattcttcataattccaggcttatcatcatggatgaaccgacctccgctctcacgcgaaaggaggttgataagctgtttagggtcatcagacagctacagggggaggggatctcggtcctgttcgtcagccacaagctggacgaagtgtttgagattgcggatcagtttaccgtattcagaaacggcaggcatattgtttccgattctgccaggaatatcgataatgaccagtttatttattatatgacgggaagaaaaatagaacaggattatttcgatcctaaggatgtggattataaccgcagcctgttccgggtggaaaatctctgtctgaagaacggattcgaaaatatcagctttgatatccatccgggggagattcttggaatcacgggcctcttgggttccggcaggacggagcttgcgaaggctttattcggcctttacagggcggacagcgggaaaatctttgtggaggacagggaagttttgataaagtccccgatggatgcgctccgcctgaagatagcctatgtgcctgaagaccgcctgacggaaggtcttttcctgacgcagtccatcgaaaataatatgatagtatccaatatagaccggctcagaaagaaaaacaggactgtggattttgagcggggacatgttgattcgaaggactgggtcagaaatctggggataaaactgaacgatttgaaggacgggatacagacgctctcgggaggaaaccagcagaaggtggtgctgggcaaatggctggagacggagccgaaggttctgattctgaacggccctacggtgggtgttgatatcggcgccaaatatgatatccacaattatctaagagggcttgcggcaaagaaaaatatggcgattgtcctgatctccgacgacatcagcgaaattctgatgaactgcaaccggatactgattattaagaacggccggattatcagccggcacaggaatacggagttagacagcaggaagctgcaggcgctaatcacaggcggagaggagatgaaagcggtatgaatatgaagaaactgctgaaaaggaatgaattttatgtaattctgattatcgtcgtcctgtctctgctcatccagatgaagagcggccagttttttacggcgaataatatcgtggatctggtgaggagcctgattgtacccggaatgatggcagcgggactttttatggttatcgcctccgggaacatagatgtatcgtttccctatacggcaatgctgtgtatgtttgcagtcacaaaatggtttcagacaacgggctatgacggtccggtgattgtcggctttctcgcagcgggcctgctcggcgccttcctaggcctgatcaacggtgtcctggcggcgtggctcaagcttccgactctgattattacgctgggaacctgctccatctatctgggatttactcagggggtactgaaaagcagcgttatttccgcaataccggcgcctctttcccaaatggcgtcctccagccttttttcagtcagaagcgcatccacaggccttggaagttccatgccggtcagtatctttatcctgatagcagtccttcttctggtcggttttattatgaaatatacgatgctcggcagggggatatacgctgtgggcggcgatcaggtcgccgctgagcgggccggtttcccggtagcggcaatccggatatttgtctttacattcatgggatttatcggaggtatcaccggcctgacccaggtaacactgtctgggatgtgccagataggattttttgacggttatgagatgacgattatcgcggccgttgtcctgggaggagccagcattgccggaggttcagggagcgtattcggtacatttctgggcgtcctgctgatgaagctgatttccaacaatctgattcttcttggtattccgactaactggagcaaactgatgaccggagtccttatcattgccggggtcagtgcatcggcttataagatggtagccgccgagcggaaggtgacttccaatattctggaaggaaataagggagagggggcggatacgaatgagtaagggcggtatgaataaaggcgatataaataagggcgatataaataaagccgataagaataaagccggaatgaataaagaattctgcgaaaaaaatgcaaataacctgaagctgctcgggatgttcgccgtatcctttgccgtactgaccgtggcaacgggcggaaagtttttctcagccgggcagatgaagctgatagcctatcttttccctgaaatgggcgtgctctcccttgggatgatgctggcaatgataagcggcggaatcgacctgaccgttgtggcggttgccgatctgtcgggaatcctgtgctgtatgatgctcaaggcggttatgccgaacgacgcgtcactgccggtgcagatccttgtactgctgctggttgttgctgccggcctggtaatcggaggactttgcggagctttttcgggcacgctcatctccagaatcggaataccggcaatggttgccacgctgggcgcctccgatatcattctgggactagccgtgggaatcacgaatggttcttccgtaaaagagcttccgcctatcctgaacggtgtcgtcagctaccgtctctttgacgccataccggcatcaaccatcatatttgctgtctgtgccggcgccgtggcatttattctgaataaaacgtcactcgggtttaagatttatatgattggttccaacaaaacagcaaccagatattcgggaatagatgataaaaagacaatcactcttacctatatgataagcggcatgctgtcatccgtctcaggactcctgatgtgcggccactttaattcggcccgctccgactttggaaaatcatacctgactccggcgatcctgatctgtgtcctcgcaggcgtcagccccaacggaggaaaagggaaggtggcagggatggtaatcgccgtcgtcattctccagactctgtcatcaggattttccatgttccagaacatatcggattattataaaaatctgatatggggactggttttaatccttgttatgattatcaatgtgacttcggagaggagaaaggcgaggggatgatttaacggaagtttggaggacgcgtccggaacggaccaggtccggtgtggcgagggggatgttattaagcacggatgggcttccatatcccctgcagaattgattccgcctccttcccccgggtcaggttttcgccggggaaggaagtctctggcgaaggttttcgcgcaccggacctggtccgtccccgcacttaacgcgtgagacaatcagcggccgcaggccggcgtcctcacctgcttatctaaatctccatgttctcataccttgcatcccggtaaaatttgttgtaggatagtaataacgacagatacagacaggaatgaagggagaaattacatgctcaatgaaagctatgcagaatgcctgattaaaaagaaaccgccggggccggcgccgttaataaagatattattggcagtgggactacttattacagccggttccattctcttgtttggtctggcaggatttattgcttttgcggcaatgtgcgcttttgcttatcacacaattcaaaacctgaatgtggagtatgagtatctgctggtggataagattttttccgtagactgtattttaaataagatgcgtagaaaaaaggcggccgaatacacgctggaggatattcaggttatcgcacctgaaaattccggcagaatcagggagtacgataatcaggtgaaaaaagtaagcgattatacatcgggagacgcgggagcggtccggtatgcctttatctatacaaagagcggtgcgggcgaaaaggttctttttgaaccggatgataaaatgctgcgctgcattaagcagatggctccaagaaaaatgtttgaaaattagatgtaacagttcatgctgtctgagctgtcacaattcgatgatacggttcccggaaaaacgtcaacgtgtgtggttgacatcactcgccaaatttgatagtattagatactaataactcaaaattcaggaataagagagtttatttgacaaaagaaggcatgaggccaaaccacgcatctgtataagatgtggccgcactctgtgaaattaccgggtgtggattgaaacaatcataatacgaaagtgaggaagaattaatgggtaagattattggcgatggcattacatttgatgatgtactgctcgtaccgtcatattcagaaatcattccgaatcaggttgatttaagcacgcatctgacgaaaaaaattaagctgaatatccctttgatgagcgccgggatggataccgttaccgagcacagaatggcaatagccatggcaagacagggcggtatcggcattattcacaagaatatgtctattgaagagcaggcagaggaagtcgataaggttaagcgttcagagaacggtgtcatcacagacccattttatctatccccggaacatacattaaaggatgccgacgagctgatgggcaaattccgcatttccggtgtgccgatcacagagggaagaaagctggttggcatcatcacgaaccgcgacctcaagttcgaggaggatttctccagaaagattaaagagtgcatgacctccaggaatctggtgacggcaaaagagggaatcaccctgactgaggcgaagaaaatcctggcaaaggccagagtggagaagcttcctatcgtggatgacgacttcaacttaaagggacttatcactattaaagatattgagaaacagattaaatatccgttttcagcaaaggatgaacagggcaggcttctctgcggcgcaggcgtcggcattaccgccaatgtgctggagcgcgtggatgcactggtcaaggcaaaggtggatgtggttgtgctggattctgcacacggccactcggagaacgtacttcgctgtgtaaggatgatcaaggaagcttacccggacgttcaggttattgcgggcaacgttgcgacaggcgctgccacaagagcgctgattgaagccggtgtggatgccgtcaaagtcggtatcggacctggttccatctgtaccacccgtgtggttgccggtatcggcgtaccgcagatcacggccgtgatggactgctatgaggtggcaaaagaatatgatataccgattattgcagacggcggcatcaagtattcgggcgatgtgacgaaagcaatcgcggccggcggaagcgtatgtatgatgggctccatgtttgcaggctgcgacgagagtccgggcacatttgagttataccagggaagaaaatataaagtataccgcggtatggggtctattgcggccatggagaacggaagcaaggaccgctactttcagagcgatgcgaaaaagctggttccggaaggcgtcgaaggacgtgtggcatataagggcatggtggaagatacggtattccagcttctgggcggccttcgctcaggcatgggctactgcggagcggccgatatcaggacgcttcaggagacgggaagctttatcaagatttccgctgcctccctgaaagagagccatcctcacgatatccatattacaaaggaagctccgaattacagtatcgaataaataccgttgatttttggcatggtatatcctgcaatggaaagatggcctttgggcctgataataacaggtgatgtccttcagagggtgtcacctgtttatttgtatcggcagatttgtggataagaatcatattaaacagcatttttggggaaaatgtcagcagggaaggtatgaaaggaaggggaataggaatggtaaaacttcgtgaaaggatttcggtaaaagacgtgggctgcttctgattggggctgtgatttacagtatcggcacgcatgcatttatggttccggccaacatagcgccgggcggtgcgtccggcatcgcgctgatggtcaattatctgacggatctgccggtgggagctttgactctggtattaaatataccacttttaatactggcctggttttatctcagccgccgtttcgccgtcacaacggcagcagcgagcatcgtatgctctctgattctggatctggcggtggctcccatctgcccggtgtataatggggacaggatgctttgcagcctgtacgggggagtactggtcggtgtgggcatggccatgatttttatgacggggacgaccacgggtgggacggatataatcggttacctgctccagaagaagaggcctcatatgtccattggaagagccttgctggtggtggacagcgtgatattaatgttttcaatatttgtattcggcaatattgaagcagctctttttggactgattgcgctgtatgcacagacgaaagtgatcgattccattatttacggcggtgatgcgggaagtatggcaacgattgtgaccgggaatccggacggcatagctgccaaggtgatttatgagctggaccggacggcgacggtgcttccggcaaaaggggcatacagcaggaaggataccagcgttcttttatgtacggtgagaaagtctcagtttgtcaagctgaaaagaattgtatatgaagaagatcccgatgcatttgtcatggttacggagacatcggaggtacttgggctggggttccgcgcgtttaaggattcgttatgaaataaggcagagcagagtgctgcgattcaagtttaacttgagttgcagtcctttttttcataggaaagcatgctggctgcagatgtatagaaattggtttaaaatgtaataaatatagtaaccggacaatgaaatcctcatgtgttcacataatcttcatataatccccacatttatatgataatttgtaacagaaatgtaatatttagatttgaaacacaggaggaaaaaagatgcggacaggcaaattaatggcggctttaatgattggaatggttctgacatcagtcaacagtcatcctgcccaggcaaagaattctgcggcaagggctgcggtgtatgagaaatcaaggtcagatgaaatacagaagacagaaacgcaggagaaagaaactgggaagatagaactgcagaagatagaactgcagaagatagaactgcagaagatagaactgcagaagataggaccgcaggagatgggattgcaggagataggaccgcagaaggaggaaacacagaagaatgggaaagcggcggaggaggagataagagatgcgtcggggcctgggaaagaaatcatacaggagcagtcacagatgcaggaacagcttccgccacaggcagcagcccaggagacggaaaaagtggataagggagcagaggttgtcgcatttgccacccaatttgtcggaaatccatacaagtatggcggaaccagcctgacgggaggcgccgactgttccgggtttgtcatgagcgttttcaagcagtttggtatagagcttccaagaacatccagggagcagggccgggcgggaactgaagtgggaggtttggaaaatgcggtgccgggagatattatatcttataaaggacatataggcatttacataggtcagaatcagttagtacatgcaagtaacgagagggaaggaatcaaaatttctccggcaacctataagcgtattctttctataagaagagtaatttaaagagagctgcagttttcggcaggcccggactgtgatagaataaagcgtctgcccggcttggcaggttaatgaaaatgaaaaaacaggacatggtgatcagttatgggaaaaaacaggacgattcttctggtagatgatgaagagaagatagtggaggttttgcaggcttatctggaaaaagcgggatatgaggtcctgtgtgcctatgacggcgcggcagctatggagctgttcagaaataacgatatctctttgatacttttggatttaatgcttccggatatcatggggaggaaatatgcaggatggtgcgcgctgtttcccgtgtaccgattattatgctgacggcgaagacagaggaaaatgatttgataaagggactcaggcttggcgcggacgattatatttttaaaccgttcagcccgagaaccgtggtggcaaaggcagaagcagtcttgagaagggtggagagcgataaacttatcagcgtcccggtttcctataatcaggggagccttgtgatagattttcaaaacggagacgttaaggccgggggacaggatgccggcctgacaccgacggaatacaaaattctggctacaatggctaaggctccgaaccggacatttaccagagaacagctcatcacctatgctttggatgataattttgacggatatgacagaagtattgacacctatataaaaagtatccgatctaaaattgaggaggatcggaaaaatcccatttttatcgtcacggtacacgggattgggtatagatttgtaggggttaccgaatgaaaaaaacattaaaaagcaccttgattattccgtattctttgattgcagtgctgctggtcctgacattgagcgttctattcaatgtcacggaaaccaggacatttgaacaatatgcaaaaaagcagcggaaaaaccaaatcagccggattgtggctcaggtcggcatgctctatgatgagcagacaggaagctatgatcagagaggcattgaaatggttgggtatgccgcattacaaaacgggataattatgcagcttgagaacgaagacaaaactctggactgggatataaggagccacagggcagaagagtgttcgatggtgctgcagcatgcggaagagaatatgaaccagaaatatcctaatttcaaaggcgggtacacggaagagcagtatccgttgattcaggacggaaaggtcacaggcacgttaaaattagggtattacggtccgtattctctgagtgacggcgaattagagctgatgaaaagcctcgataaatcacttttgataatcggtgcggcagctctttgcattgtggctgttcttggtatgttaatcgcacgggctgtcaccgatccggttacaggcgtgattcggacggcacagaggatagccggcggtgagtacgggacacaggcggaaaaaaattcctccattgcagagacggcccttctgattgaagcgatcaacgaaatgtcgcttaagctggaagaaaatgaaaagcaaaagcgccggattacgtcggatgtggcccacgaacttcgtacgccgcttacgaatctgcagacccatatggaggcaatgatagacggggtttgggagacaacgacagccaggctggaaagctgtcacgcggaaattctgaggctggtcgggattgtggagcagctccaggaactctatctgcttgaaaataaggagcaggcgccagataaacggagatttgatttcagggagttatgcatggaggtatttgacggctttgaaatcaaggcaaaggagaaaaatataaggcttctaatggcaatgccgcctaagacgcccgtttatgcggattattaccgtctgaagcagtgtatgataaatctgatctccaatgctctggcttatacgcccggaggcggtcatattgcagtagaatacagaatgcgggaaggacacgtggagataaaggtccgggacgacggtcctggtatacctgcggaggatatttcacatctgtttgagcggttttaccgggtcgacaaatcccgcagcaaaaagacaggaggcatgggaatcggattggccattacaaaggcgattgtaaaaatgcacggaggggagatttcggcagagaaccagaatggacagggggcggtattcacaatcaatctgccataccaggctggatagggttactgttcacacccaatgtcaatgtatttacattttttgccggctggcgtataataattgcatcacaaattctgaaagggacaaaaatggtatttaaaattgcactgctgctaaaagaacactttcgggagagaatcagcagctatatgtcaaacaaaccggaagatgttgtcattgattttatcccatattcgacggtgagagaggtacaggatatttttctctctataaaagatcaatatgacggattttttgtaagcggccttatccctttccaggccattaaaatattaggtgaaaaaagtgaagacgcgataataggccatgcttccgtaaatgtggaaaatgcttaccaggcgcttctccaccacattgttacggaaggtgtggagaatgtggatctttcccgcgtggggatggatttccttgatgaccaaaagacgctgaaagagctgattagggaggaaaaatttgcccaggccgcttataaacatgaggcgtactggagcagtatgcagagtctggaagagattgagaaggaagagcagcgtgtccaggacttctatgtgaaacagtatgaggaggggaaactggatctcatcattacctattatcaaagtgtcatagagcggatgaaggataaagatattccctgttattacgtgtaccgcggcgagtgggcgttctggaatagcatagaagaactgaaaaagagtatatacatcaagaaatttaataagagccgttccgcggtcatccatgtcaatacggaaaaagccagggatctgtataaagacaaatatgacctgttccatctcgaactggtgcgcatggtaatacaatttaaccagattcattttaataaggctattttcaaggcaaattacgatgagctggagctgtatatggactgcgagacgatggagcagctgacagaggggttccatcaatgccagctcttaccgttcttaatcagggaactggattttccgggctccgtgggctatggaatcggggacaatatttatcaggccaggctgaatgccattaatgccagccatttcggccggagcaggggaaaggacaatatcggaagctttcttcttgaccagaatgaatccctgattttcctgacagccgatgtggattcagggatcggaccggttttttccgtcagggcggggtctgtctcagagatagcggataaggtgaagctgtcgtccgagacggtggtacggattgcggaagtcctgaacacggttgagagtaaggaaatcacttcccaggatttgatagacggactggggatttccctccgcagcgccaataaatttttatccaatctggagaagggcggatatgcatccgtctgcggacagaagaggaatggaaataaagggagacccattaatatttatcatgtggatctcaaattgaaaacgcagtagaaggtccggaaaaagccggacaaaaaaggcagcaccgggcagttgaatttcaactgtccggtactgcctttctgcatgaaagccggtgacctgtacattctgcttgcaggttatcggtgaagtcggtgacctgtgcgctctgcgagcaggttatcgttaccagataacgacggagacagccatcagtatgctctgcgtaagaacgagtacgataaagacagggacaaaccatttccaccatttctcaatcttgacaccggcgataccgcagatgattggcgtcatcgatgtaggccagatgatattggaaaggccgtcgccaaactggaatgccagtacggccgactgtctggagatgccaatcaggtctgccagaggggccataatcggcatacttgtcaccgcctggccggaaccggacgggatgaagaaattaattccggtctgaaccaggaacatcgcaacagcggagatggctcccggaagcttggaaagcgggatagacaggtagtatacgatagtatcgataatatggcctgcctggagaaccaccagaatgccgcgggcaatacctatcatcatacaggcaacggcaatctcggagaagctcttcgccactttctcggctatttcattgggtccccagcccatgatgaaaccgcttacaagtcccatcaaaaggaatactgcgctcagttccgcaaaataccatcccttggctttcgttccccacacgatcacaacgataccggcaacgagagtggctaacaccagtttttccctgatcccaaacggcttgttttcgatatgatccgaatccatggcaaggctgctgaaatcatcaccgtaaacaaggctttttgtcggatcggcctggatttttaatgcgtaccggataacgaagaaggaggcgaccgcaataaggatgatatgacagataatccggtaaccggcgcccgacatctgcgggacatcggcaatactctgcgccatgccgaccgtaaacgggttcatgacggcgccgctgtagccgaggccggtgccaagagcgacaatggcaaggccgacaatggcatcatagcccatggcaatggcaattcccacaaaaatcggaataaacgggaacatttcctcaaatacgccgatggttgagctggcgcatccaatcagggtgataaatacagggataataatggcacgtgcggatccctttaatatcctgagcatgctggcgacgaggccgttaaaagcgccgctggcaatgatcaggccgatggatgcataggaaataaatacgaagaagattactccggctgcgtccacggtgccgttataaatagactggacaagggtgaagaagcctaccggtgtggattcaattacatgatatgtaccgggaaccaccatttcccttccggcatcactaagcgcccgttcaaattcaccggccggaagaaaccaggatgcggcggcacaaataattgtaatcgaaataagaagcacataaatgtgcggcatcttcattttttttgcttttttcgtttttgctgcagactcactgctcatacgttttctcctctcataaaaaaaccccatttactttcttttttctacctgttcctgaaattccgcatacaccttgtttctgaaggcctcatcgttaaatgtcctaagagccgtcagcgccaggatacaggctcccttctccattgcctcctctgcctgaggcagggcagttgcatccctgaatgccgccgtgtgcagcgcataatcctcatctgtgacagctaacagaggctggatggcagggcaccggtagctgacgttgcccacatcagaggaaccgctggcagcttcaacccccgttgtcggcatgccgaatgcctcaaactgccgtatgatctcctcctcaagtgtcatgttgcgaaccatatctgcaaattcaaaaacagaggtgaatttcacggtacaatccagagccatggcagcgccgtccgcacattttttcaccatttcatccactgctcccatggatttcatcgttgcggttctgaattccatcctgagttttacatagtccggtatgatattgggcgcttttcctccgtccaggatgatactgtttacatggacatccggagtaaagcattcgcgccgcgcatcaatcaaatccagaaacttcctggccgccgccagagcgcttttgccctcccacggtgcggcaaccgcatgagccgcctgtccgtaaaattctacaaaatagcattgcaggctcagcgcgtccatatcggcccggcacttgccccccgaccagctgtgcatcatcatggccagagacatgttgtcaaagatgccctgggcagccatgcctatcttagcgccgttttcttcctctgcaggggtcccaatcacatgcacttttcccctgtaaaactcctttagatctttaagcgccagacctgtcagtacggaaagagagccgtgaagattgtggccgcagccatgtccgatttccggaagtgcatcgtattccgccagaattgccacttccgggccgtcaccgttgtcgaagagggcatggaatgccgtctcatatccggcgaaggggtatgtaacctcgaacccggcttccttcaggatctccaccatctttctgctggattcaaattcctgatccggaagttccggatgctctctcaggtaacagctcagttcagcagctttcttaacatgtgttccaataactttttttactgacgacagttcgtaatctgtcataacaccatcctttctgagtccccccacaatcatttccgcatcaggaggtaggtttgatagtaattttgtatgcttttatttgcagcatacttaaagaagagttctttaaaacggattatagcatagaaatgtgggttgatcaatgatttttgtaaattaaatatttttttgtaatttttcagttaaagagatttagttaagcaggtgaggacgccgccggaacggccagcggacggggtggtggggtgtgtatatgagtctttcgtcccgggggagattgtcgtggtttggggctgcgggcgaagataaagtctgcggagcacactcccgctctgtgaaatgcatcgcgctgctaagctcgacaggacctcgctaatcagcgatggatttaggcggcatccgcagactttatcttcccctccgcccaaggccaggttttcgccgggacgaaagactccgccgggggtatcggccccgtccgccggcctgcggccgctgattgtctcacgcgttaagtgcgggggcggaccttgtcgcggccactcagcgcttccgtgtgtgggaaatacgtagtggccgcgacagggccctctccatttaaggttggagacaatcagcgcccggaacggaccatgtccggtgccgcgaaaatctccgcctgagtcttccgtccccgacgataacctgacctggggaagtaggcggaatcaattgcgcaggggacatgggagtccgccggtgcttagcgaggtccctcacgagcttagcactgctgcgcactccaaagagtgcaaacggtccccgcagcaattcattccggccggattccccctccacaaccaacttcccacggggacggaagactcagccatccccccaccacaccggacatggtccgttccggacgcgtcctccaaacctcagttaaatctccatttgaagaatccccccataactgctataatgaaatttaaacacagtaaaaaactggaaaaatagaatagggaggatgcaaacgaatgaaaattacaggagttaaagctgtattttacagcgcaacaggcaataccgaggaagttgttaccgcgattgcggaaaaaattgcagaaaaactgggggtatcgatggaaatatgcaattttacgctgccgggcggcagaactgaggtgcagacgtatgctccgtctgagctggtggtgtttggcacacctgtttatgcaggccgtgtgccgaataaaatgcttccggtagttcaaaacaacttcaagggggaaggcgcgcttgcagtaccggtagtcaccttcgggaacagaaattttgacaacggattgattgaacttcgcaatgagcttgagaataatggattccacacgattgcaggagccggatttgccgtaagccatgtattttccgataagattgctccgggacggccggatgaagcagacagggagattatgatgcggtttgccgaagcagtggctgagaaagtggaaaagatggaggaaattcccgctccaatcgaagttcgcgggaggatccggtaggtccgtactacacacctcttggcaccgatggaaagccggcggtattcttaaaggcaaaaccaaagacaaggccggaggactgcgatagctgcggtatctgcgtggaggcatgtccgatgggttctatcagcagggaggatccgaaagaagttccgggaatctgcattaaatgccaggcatgtgtgaaaaaatgtccgaccaatgccaaatattttgatgatccggcttttctgtcccatattgctatgctggagcagaattatacccgcagagcggaagctgagatttttatttaacaggaaagtgctttgttaaataaaaaccgctttgttaataaaaaccgctttgcggagaatgcgcactgtgcgttaagaaagtttggcccgctaaagcggccgtgttccggcgccggagatattggttgtgaacggccgccaattgcctgtaatgaatgtaaatagcaactaattttctgaaattatagggttgcaggcctgatttttttgttgtcacataccttttcatttgatataattaatatgttatttttcggcagagggacgtacagttaactgccgggactgctttcggccgggcagttaacgcggttggggaaaggagaagtatgacaaaagaaaagacaaaaaaagagaaagtgggaatgcttgatcggatcctcgattcaatcgaacgggttggcaacaagcttccggatccgatcactctgtttctgggactggcagttgtagtagtaattatttccgcaatttgcagtatgctgggagtgactgccgtcaatccggcagacggttccaccgtggaaacctttaatcttttttccgtggcaggtatccagtacctgtggacgaacgtaattaccaatttctcaggctttgcaccgctgggtatggtactggtagccgtgattggttcgtccgtggcggagaagagcggtttccttgtggctttaatggagcatttcctgggaggcgccaagggatggatagtttccatggtagttattttcctgggaatcaatctgaatattgcgggtgacgccggatttatcatcctgccgcctctggctgccattctgtttatgtccatcggacgcagtccgctgctgggactttatgtggcatttgcatccgtggctgccggtttctgcgccaatattcttctggggctgtctgatgccctggcctatggttttacggagtccgcggctcagatgattgatccgaattactccgcatccatggcaattaactggtatttcctgattgcgtcctgtctggtgttgacagttgcaggtacaatcctggtggaaaaggtcatggttcaccgtttcccgatgacaaaagaacagctcgctaaatacgattttgatgaagatgcggccaatattaccccaatccagaaaaaaggacttcttatggcggggctggcggagttgatttatgtgattgtactgctgcttttatcattgccggttttcggcccgactgctattttggcagacgaggcaggttccattacaggtggcaattcgccttttacaaaaggaattgtattttccgttactctggctctgatgattcctggtattgtctacggcgtgaccatcggaaaatacaagaatgataaggatatatgggccgatatcagccagggcttttccgagatgggcaattatgtgtttatgtgtttctttatctccatcttcacaaatttcttcgctgtatccaaactgggaaccatcctggctatcaatggggctggattccttcagaatatcggtttcagcggaattccgctgatgattggcctgattatactgtcctgtttcgttaacctgttcattggctctgcttctgcaaaatgggctattctggctccggttttcataccgatgatgatgctgatgggatacgatccggcggtgacacaggtggtttaccgaatcggcgactccatcacaaatcctctgtcgcctctgtttacctacatgcccgttattttaggatatgcgcgtaaatatgacagtaaggcaggattgggaacgattattgccaacatgctgccattctccattacttttgcagtggtatggattgtccaggtaatcatttgggtaggaatgaatcttcctcttggacctggcggagctatttaccttccgtaaaaagcgatattttaaaggtcaattgtatcagtacataggagtacttcggcggtccggcatgattatgaatcggaccgccgtttttaggaaaggagctatttatgaactatgggaagagagcggctgagctgagcggtgaaatcgctgccagccgccattatctccaccagcatgcggagctgtcgttcaaggaacaggagacgacggcttatctggtggaggagcttgaaaaaatgggcataccggtacagaaatttgacgattataccggttgtatcgccacaatcaagggaggccgcccggggaacaggacggtgcttttaagggcggatatcgacgcacttccgattcaggagaacagcggcgttgaatttaagagtatccatcccggcgtgatgcatgcctgcggccatgactgtcatgcagccatgctgttgggagcagccaggcttttgtgggagagcagagaagagctggccggaacggtgaagcttttgttccaggctgcggaggaagtgtttgtcggcagccattattatgtggacaaagggtatcttgacgacgtggatgcggcaatgggacttcacgtctggcctacggcttccagcggcaggctggtcgtgatggacggtccgctgatggcaagctgcgataattataaaattacggttcacggcgtttcggcccacggctccgcaccaaatcaggggaaggatgctattgtggcggccagcgccattatcactaatctgcagacaattgtaagccgtgtaaacgatcctctgaattccctggtggttacggtaggaactgtccgggcgggaactcaatttaacattattacggacaccgccgtcttggaggggactgtccgggcccataccgtggaagcgcgggaatggtggagcaggccatgcaccagattgtagattatacggcaatggcccatggatgtacggctgaaatcgaatataaatatcttgagcctccggtgtgtaacagcgatttgaagctgaacgaaattgccaggaacgcagccgttaagctgtatggcagggaagtgctggctacgacacctaaggcaagcggaagtgaggatttttcttatattatggaaaaaatcccctcctccctgtttgtatttctgggatgctacgacgaggagagcggctgtgtccatgccctccacaatgaaaaattcaggattaatgaggaaattcttccaatcggagcggcacagtatgcacagtttgccgctgattatctggaagccggcgcgggaggtgagatgaaatgaatatccgtcaattagcaaaggaacaggaagattacgtaattaaatgccgccattatctccacgcccatccggagctgggggaacatgaggtggaaactacccgttatatcagggagcagcttgaggagatggggattccggttcagacctttgagggaatcacaggctgtatcggcaccatcgaaggcggccagccgggaaaaacagtgatgctcagagcagacatcgacgcgctgccgatacaggaaaatccgggcaagagctattgcagtgtcaatcccggagtgatgcatgcctgcggacatgactgccatacggcgatgctgctgggcgcggcccgcatattaagtgaacataaagcggagcttaagggcaccgtgaaattgattttccagatggcggaggagatcggccggaagtcggaagagtatgtaaaacgcggagctttggaaggcgttgacgctattttcggtatgcatgtctggtccgcgatggatctcggctcggccagctttgaaagcggagaacgtatggcttgcagcgaccgttttacaattcagattcacgggaaactgtcccacggaagcgctccccatcagggacgcgacgctattttggctgccgccgccgtggtaatggccctccagtcaattccaagccggatcaatgatcctctggacagcctggtagtaaccgtgggtatgatgaacggcggaacgaaggaaaatattctggcagaccacgtggagctggtgggtacggtgcgcgcctttaaccgggaattcagagcgggaatgcctgagcgaatcaaagagctggtgacgaatgttgcaaaaggatatggctgcagtgccgactgcgactactattttggcccaagcccactgatcaacgacgatgaggagctggtggagctggcccggaaagcggcggaaaaggagctgggagagggctgcctgaagcacctgccgaagatgacgggagcggaggatttcagcgtttatatggagcatattcccggtgtatacggatatttgggattccggaacaaggagaagggaatcgtgtgcagccaccatcatccgtcgttcgacattgacgaatcggtgctttgccacggttccggcatttatgcacagtttgcggtggattatctggagaagaaggcctgaggttagatttaactgaggtttggaggacgcgtccggaacggaccatgtccggtgtggtgagggggatggctgagtcttccgtccctggttgaaggttgtcgtgaggggggaatccggccggaatgaattcttacggggaccgtttgcacttttcgaagcgcatagccgtgctaaattcgtaagaaacctcattaaaggcggtgacctgtgcgcagagcgtacaggttatcgttctgcacagatgggcttccatatcccctccagaattgattccgcctccttccccgggtcagggtttcgcaggggcggaagattcaggcgaaggttttcgcgacaccggacatggtccgttccggccgctgattgtctctaaccttaaatgaggagaaccctgtcgcggccactacgtgttttccggcaggctgatatcaaatcttccgcaattttaaaaaaagtgcattgaaggcatatcgcatttctcgtgcacggtagcactgagtggccgcgacaaggtctgtccccgcacttaacgcgtgagacattcagcggccgcaggccagtggacggggccggtacacccggcggagtctttcgtcccggcgataacctggccttggggcggaggggaagataaagtctgcggatgccattgaaatccatcgctgattagcgaggtcccttacgagcttagcagcgcgatgcatttcacagagcgggagtgtgctccgcagactttatcttcgcccgcagccccaaaccacgacaatctcccccgggacgaaagactcatatacacacctcaccaccccgtccgctggccgtaccggcggcgtcctcacctgcttaactaaatgacgttgattcacatcctgagatatcatggaaaagggagacagcccggctgtccctctcatcccctcctttttctctgtgtcagcagcagtaccgtagtgataatagccgccagtccggcaaaatccattacggtaaagtcggtgcccagccacagagcggagataacggttgctgaaaccggttcgatgcacgccagcatgctggctttgacggagccgatatcactgacgccctggagatagagggtgaaggagagggcggttccaatcagcacgatggcggccaggccaagaaccgttcccagatcaaaggttacacggaccgtccagtacctggtggcgaagaacaggaaaatacctcctatcagcatgccgtaaccggtgacgaccgtgcttccccagcgtcctatgattttttccggcagcatggtatagctcatcaatgccaccgctgataaaagtccccatgccaggccaaggtttgagatgacaagtgagtggatattgccatgggtagccagaagaaaggttcccgctacagccaggatgatagcgaagacctccctgcctgaaggaagcttttttgccataaagcaggacacgatcatgatgagaaccggaccaagatactgcaaaacggtggcggtccctgcattggaatgggaaatagccgtcatatagctgtattggcagaacatcaggccgaagatggagaaaatgaaaagctgccgccggtcccttttatcctgcatgatttctttcatctctttacgctgctttataaaggccaggaccagcaggatgatgccggcgcaaatcatgcgcgtgaccgttacccatgcggagtccaggtttttatatgtaaaaagatactggccgcaggtgccggaaaaaccccacatggtaccgcccgccagcgtaaagaaaatcccgcgggctgtctttgatttgtttaagctgtcttttgaatctggattcacgttcttttacctctgttagtcattgttcacaggcaatactgcccgaagcgttatcgagagtgtgttttgtgacaattaatattctccttgttttatatcagattgtcaagaagtttcatatgaaattccaatacggtatcaaacagttgtaaccgttcagacagcatgaactgttaccaaaagattgcaatgatggggaaaattgggtatgatagtaatgtaccgcggcagcaccgcgaaacgccggtacaggaaatgagaggagatgataggatgaatgagaaattgacgattacatggctgggacattcctgttttaaggtggagtccggaggatattccgtggtttttgatccatatgcagacggaaaagttcccggattaaaaccgctcagaatcgaagccgacgaggttttatgcagccatgagcattcggaccataacttccgtgaggcagtaacactcagaaacaggaatgtggcgtcgccgtttcggattcaggaaatttccacttaccatgatgaaaagcagggtgacctgagaggcaaaagtacgatacatattctggatgacggagtattccgaattgcccatatgggagatttgggatgtgaactgccgaaagaacagagagaaatgctgaaagatttggatgttttaatgataccggtgggaggctattacacgattgatgcggcccaagcccgtcaattggtggagtacgtgactcccaatgtggtgattcccatgcattaccgtggaatgggctttggctttgatgtgctgggttcggtcaacgaatacctgggattatgccagaatgtagtgcggtatcagaacgttatcgaaattacgaaggacatgccgagacagactgcggcaatgacattttaacaacggtaacctgcaggcaccgcgcacgggttaccgccaccagtgaaagcataccccggaaaccacatttccggggtttcgctattgacatttaaaaaccattgtgttaatttatatataaacacgtgtaaataaaaaaatatttgtgcagaaggtataaaatatggccaccagaaaagatgttgctgacctggcaggggtatctcctgcagtagtctcttatgtattaaacaaatcgaattatgtaagtgaagaaaaaagggccgcagtattaaaagcggtggaaaagctgaattatcagcccaattatatgggccggagcctgaaaaataaaaagacgaataatctaggactcatttgcgacgatatccgaagtgaactttttgccgagattgcattctacagcgagagatatgcctatgagaatggctacagtttgtttttatgcaccagccatcaggatgataaatttttgaatggcattgtggatcaccggctggacggaatatttctggctaccagtatttacagcaccgaacagattaaccagatagcaaagagcaatatcccggttgccctatacaaggcgcatcattatgataatctggatccgcgcgtaaagtgcattgaggtggattaccgcaaagcggcttatatgctgacggaacgtctgattctgaaaggacatgagagaattgcatttttccctccgtaccgctctaagctcagctactgggaaagcgctgacttccgttttaaaggctatcaggatgcaatgagacattatggacgcccggtggaagagacgttaatctgttatgataatgagtattatgaggacattatgaaaaaggcggaggaaatctgccgccgcagtcttaaggaagagggaaggattgcattcgtgacagggaatgattatctggcaatccggataatgacatatttaaaggaagtaaagctttataacccggagacagtgtcgatcaccggaatggataatacgtcttcggctggaattgccagcccgtctctgacgacggcaggcttttcaaaggtagacgtagcaaaggccgtggtggactatctgattcacggcgcagatgcagaaggaatcaagacgaaaaagattcccgtatttttagtagaaggcaatagcggatgataaaccgttactgttcaggtaatatcccgtgaggtgttttgttcacggaacggcgctgttcggcagggccgtgaatcgtaacgataaacctgaagctattgtttttaagaatatatttactcgtgtaaataccatgatggatcaataatcaatattatctttattttttatttaagaatttacacgtgtaaacaaatcagggagggatgaaagaaattgaaggtggagaaagagatcctgatggaacagatcccggactttatgcggtaggggagattcttctggacaaggaactgtactatgcggcagcttctgaaaatcgtggcggcgggctgtatttagtccacagcatgacgaaggaaatcagtgagcttcagggatgccagggaggcgtgatggcagtgctgggagcggcgcaggagagggcaattctctgtatcgaagaattttacccggtgtttgactcggctggagcgaagatcgtgaaggcagagcttgagcggaccgggaagggctgggccgcatcacggcgaaagacggtggctgaggttccctatgtacaccggattgcacagcttacggaggaagacggaaattttattgcggccggaaagctctgtaagcacaaggattcttcggatgactggtccacttcggggagtatggaaatcggccggtacgaaccggaggaaggcgtctcgtcctttgaacgggtccgggacgggatttataaacaccatgcaatgtttatcaggaaaaatgagtcgggttatgacgatctctattatggaggaagcgaaggagcgtttgtgacaacacgcaaaaacggaacctgggagacgagacagattttggacgtaccggtaagtgatattgtctgttacgatttggatggggacggaatggatgaaattgccataattgaaggattccatggcgataaagccgttattttcaaacaaggcgcaggcggatatgagcgggcgctggaactgccgttagatttcgggcatgtgctctggggaggcagttttctgggacaacccggactgataacaggaagcaggggaggcggaatgcaactgtccctgtaccgttttaatccaaacagggaagaagaaaacaggctgtctgtccgttcggagactgtgattgacaaggggcaggccccggcacagattattgtaaacgaatggaaagatagcgctgagataatagctgcaaatcatggggagcgcagcttgtgaggtaccgctgcagtctgtagggacagatgaaataatatcggtaaaaaacagcagtaaagaagcagcagtaaagaagcagcagtaaaacagagaaaaacaacagttgtccgcacgtgggacagcataaaagaaaataaaaaaggagaagaaaaatgaaaaaaagaatggcaaaaatggttcctgtattgtgtgtagcagcgatggttggattgacggcatgcagttctgcaaagcccgctgagacgaaggctcccgagacaaaagcggaggcggcatctgagaaagagccggcgggggaagaaccggcggcagccgtggattttccgaaagatacgcttaatattatctgtcatgcggcggccggaggcggcagtgatgcactggcaagacaggtggcccagggcctgcaggatggaaacggctggacggtcacagtagataataagacgggcggttccggctctgtgggaatgcagtttgtcatgaattccaaaccggacggctataccatcggtacggctccggtggagctttccatgatagaggcgcttggctatgcacagctggctccggaggatgtccagctgctgggctgcggcatgtcctggccggcggcgctttatgtgcctgccgacgctccctatgatacgctggaagattttatcaattactgtacggagaatcccggcaaggtgcgcgtggcaaactccggaatcggctcgatctggcatattgccgcctgtgtgttggccgataagacgggaatcgagattaaccatgtgccgtatgacggagctaccggtgcggttacggcgctgctgggcaaagagatcgatgctgttgtggtcggtacctgtgagggatattcctatgtggaatcgggagattttaaatgtcttgcttccttcagcgaggagagaagctccgttcttcctgatgcaccgacggccagggaacaggggcatgacatcaatgtagtctgctgggtagggttccttgccccgaagggaattgaggaggcaaagcagcagatcctagtggatgcgttgaagaatgtatttgccggcgacgcttatattgaattttgcaaaggcagaggttgtgacagcacttattatacgccggatgaattccttgccatggcggaagcggattatacctattattccgagctgatctcggaccttaagattggtcagtaagcgtccgaatttttaggagaatgaaaatgaagaagattacaggaaatacgatagtaggttttttatttgcggcggcagccggtatcacgctgtatatttccaatgccacgctgaaatcggcttctgcgatgggggatccgggaccgaagatgtttccgaatgcagtatgtatagcaatactgattctttctgtgattattatggttcagtccgtttttaaatctgagaagccctttaaaggcgcgctttccacaccggaaggaaagcagggctgtacaagaatgatattggttctgtcagatttggcgctttttctaatcctctggagatatgtgccgtttctggcggcaggggtcatttttatcttcctgctttgtatggtcttcagagaaaaacttctgttctctattatctattcagcggcagtgacaggcgctctgtattttgtgtttacgatcctgctgaaagtgaatttgaatatttgctgacggacagaagcggcggccatgaatgccggtgttcatggcctttgggacagaaatcacaatcacggttaatgaggtgactatatggattatttatcagcaatacaaactgcattttctcccggctgcctgttctgtatcacaatgggcgtactgatggggctggtagtgggaaccctgcccggcctgacctcggtgatggctgtctccctgattacgcccctcacgtttaagatggatccggtcaatggcttcggcatgctgctcggcgtatacaattccgccattttttcaggagggatatcggcgattgcgatcaatacgccggggacacctgcctccatcgcaaccacctttgacggatataaaatatccaaacggggcagaaccgggtttgcgcttggggtcaacacgatttattccgtcatgggaggaatcttttccaccgtggccctgatgattgcctgtgaacctctggccagctttgccctgaaattcggttcggcggagtacttctggcttgccattttcggcctttccatgatgatcagcatttcccatgtcgctcttgcgaaagggctggtggtcggcgcactcggcctcctgctcagcactataggccttgatccgatgctgggaagcaagcgttttgtaggaggcaatgtggcgctgcttgacggaatttcttttatcccggttttaataggcctgttcggcatcggggagatgctgtaccagatatttgaaaatgtaaaggaaagcaagaaagaagatattgccgttgtcggtaaaaaggatcgtgtgcttccgactaaggcggagcatcgcaggatggcgcttccggcttttatcggttcgataatcggtgtggtagtcggaatcgttccgggaaccggcggggacatttccgcactgatatcctgggatgtttccaagcgcgtttccaaacacccggaagaatacggagacggctcgattgaaggtcttgcgacgacatgcgcatcgaacaatgcgtcgattggcggcgctttgaccacggcccttgcgctgggcatccccggggactccagcacggctgtgcttctgggcgctctgactatgtacggaatggtgacaggtcccacgctgctcagtaaaagcagcgacttcgtctgccgcctgtacatcatcatgctgcttgccaacatcattatcctgccattgggactgctctcggcaaaggtctgtatcaagctgctgagcgtaaaaaatgagtatatccagatggcggtgcttctaatctgctgtatcggagcctactcgctgaaccggagctattttgatgtaattatcatgtttattgccggtatcctcggctttttcttccgcaagttcgactacccgctggggcccctggtgctggggctgcttctgggaggcatgtgcgaaacgaatctgagacgtactctgatgctgtcgggagggagtctgatgcgccttttcacaacaccgatctccatgcttctggtaggactgattctgctggcaatcggctggcccgtaatcagtgaatttaagggaaggaaaaagaaaagctagcggcagttcaggcattcaggcagtctgaatgaaggaaacatttattgatggcggtgacctgtgcgcggggcgtgcaggttatcgtataaaaagttataagaaagaggtaacagatgcagaatatattgccatccatccatttgctggaaatctttatgccggtggcggaccgggaggattttctcgtcgggatgctggaggaagtgaagaatattgatttttacaagggaattgaactgccggttattttccagaaggagaatatcgccaaggtgaggcggattgcccgggaaaagagctaccaggttaccgagtgggcatcgcctgatatcataaaaagaggatacaatctgtcctccacggacagggagctgaggggaaaatcggtcggttacgcggtggagcttatgaaaattgcagcggaagccggaactgcgattgtcggccttccatcaggagatgatccgggtgatttaaagcgggaagaggcgaaaaaagcgctttttgattcctattgccgtatctcagaggcggcgaaggaatatgacggcctgcatctgacgctggagccgctggatcggtatgtacacaagaaacagctgatgggaccgatccatgaggtggcggaatggttcggcgtgcttaaaaagacctgtcccaatttctacctgcactgggacagcgcccatgaggctcttgcaggcatcggcctgatggaatcgctggaggcggccctgccttatatggcgcagtttcatatctgcaactgtgtgacggaaccgtctcatccatactatggcgattttcatatggaggtggggagagccccacattataagaattggggatacctgactcctgagatagccgccggtttattaaaacgtgctgctgagggaaatccggcggagggaataacaaacacccacgtagccgtggaagtgcgcagccatatgggagacgcactctgggagagagagagggacatccgcggatttttaatgagagcgtttgacctggcaggcctctcgtattaattaagaaagcgggttactgttcgcagaaccgcgcttttcagcgtggctgtgaatagtaacagggcagcaggaggagaatgagatgatacttgattatatgaaaaactaccggatgtataattcacttgtttcgaatctggaggaagggatgacgtttgtcaattcgctcctggataagccggaaggccgctatgaggcggagcatggtatctacgccatggttcaaatcggaataacctccgatatcggcaaagaccggatggagacacatgaaaaatatctggatgtgcagatggtattcgaggggcgggagacatttgagtgggaggaagcgtctgagctggaagcggagacggaatacgatccggagacggatttcaagttttacaggggaggcggaaagaaaattcttgccacagagggcatgttctatattctgtttccccaggacgcccacaggtgccggggaatggccgggaaagaaggggaaaagtaccgcaagattgtgctgaagcttccggtggaaacgaagcggtaagcgttggcctctgccgttacggcaatttaaaggagaaggtgtatgtatttatatgaggggatagaaaaagcggaaaagaaactccgcgccgtgctgctcggatgcggggagcaggcggtcaacatgatccacaatgcgatatcttacctggatgaaatcgaagttgttgcggtctgcgataaaaataaggaacgggctgattttgctgcgagacggctggggctgtcccgttcttatcaggatgcgggccgtatgcttgacgaggtggatgcggacgctgcttttatcattaccattgcagggctccaggcggctctggccaggcagtgtattgaggcggggcttcatgtgtatacggaaaagccgcttggcaccgagctgcccgatctgctgatgcttaaggaggcggccgcaaaacatcacaggaaaataggcgtttccttcaataagcggtacaacctggcctaccgggatatgaagctggcaattgagtcggaaggattcggcgccccatctgcatttattgcgaagtttatcggaggataccgttccaacgaaacagatcttctccgcgtcggctgctgccatttttttgatttggcgagatacctgatcggcgaactggatgaggtatatgcttacaaatacgagaaacagccggggcagcatatgtttgcagtgaatggtaggtttgtgaacggctgtgtggccagcatgacattcggcgcgctgggctcctgggtatgcggatacgggatggagagcgtggaagtgagaggggaccggaatatggtgagcgctgaaaacgggcgtgattttacctggcagaagccttcgaggatacgggagccggaggcgggacttgaaaataagggcacccaggcggttattgaagcagccgtcccggttgagattatgcggcccaattactcaaatctcggaaaactggcaatgaaggatttttatatcaatggaaattatcagtgcgtgaaagcgtttgcaggcgcgattctgaatggaacggagccgccggtgggatatgcggacggattgatggcgcttaaactggctctggccgtagaacgaagtgctgcagagcaccgtcctgtaaagataggagagattgagggatgaaaaagttatatggggttgtagtgccgatcgtaacacctcttacgcaggaggatgcgatcgacgtaacgtctttaaaaaggctggccgatcactgtattgacagcggcatgcagtctatctacccatgcggaaccacgggagagatgatgtatctgtcggttgaggagcgcaggctggtggcggaaacagttgtgcggcatgcagccggaagagtaccggtatttgtacacgtgggtgcatggaatctgagggatacggtggaactggcaaaacatgcggccgaaatcggcgcagacggcattgcagttgtgacacctgcctttttctccgtcagggatcaggggctggttgattattttacaactgttgcaaaaagcgtcccgcaggatttcccggtttacctgtatgcgatcccgcagtgtgcggtgaatgacataagtcccaaagcagcagaggaatgcagccggctctgtcccaacatagtgggaattaagtacagctatccggatatgacgcgtatccagcagatgcttcggataaacggagggcagttcagcgtgctggtcgggccggatcatctatttgccgccgtctcggcgatgggaggcgacggggtagtctccggaaacgcccagattatcccggcttactataagaagatatggcagcttctccaggagaaaaattatgaggaagcggccaaatggcagcacaggacaaatcttctgaatgaaacgctctgcgagaacaataatattgcagcatacaaagtaatgctaaaacgggacggaatcattgcgacgactaagatgcgcaggccgatggaaaatctgactccggaacaggaggaaaatttgattgcggcaatggagaggctgaggtatcgcgggatataaggagctggctgtttaccggtcgaggtaaaaaaacaggcgcggaattgagtaaatgaattccgcgcctgttttttgtaagtatggccacgggcttagcactgctgcaaactcaaaagagtgcaatgtcagtacggccagcgggcgggcaacatcatgacatgataccagggtcaaaaggttggaaatctgatgcaagcttgcttgcatgaagatttttaatcttgggacccgccaaaaacatgagtaagaagccatttttcgcagaaaaatgagcggattgcgaatgtttttgaggattgtgagagcacgcagtgcggagcaatccggtatcaaagggggcaaaagaccttttgaccccaacatcatgacattggactaacatccccacaggggctgaagactcagccaatcccattcaccacaccagatctggtccgttccggacgcgtcctccctcaacattttctccccgcagttgaaaaaacaggaaaaaacagggaagaatagaaagtgtaacagttcagccatgatgtattccgcgaggtgttttcgctgtttgaaagtggaaaactattttccatccccttgtgaaattccgcatcttacgttataatgataaattagaataatatccgatttttggcggtaccgccttatgagactgccgtcaggacagacggggatggcagatacaaaggataaattgatagaatcaggaggacatgaaatgaccagaagagaattgcgggagcattgttttaaactattgttctgcgctgacttttatccggaaggcgagacgaaggagcagatggaagagtattttaccgagccggtggaggaggtaagcgcccccggcggagagagtgagatccttcacagcccggcccttgacgtgtttgacggagggtatgtaacgaataaggtggagcgtatcatcgagaagattcctgatttagacagccggattaatgagatcgcaaagggatggacgacaaagaggatgggcaaggtggagcttacaatcctgcgcctggctctctttgaaatccagtatgatgaggatgtgcccgagaaggtggcgattaatgaggcggtagagctggcgaagaaattcggcggagacgactccccctcatttgtcaatgggattctggcgaagctggtgtaggctatggcaagagcggcaagtgtatattccgtatcgcaggtcaatgcctatatcaagaatatgttcgcccaggattttgccctgagccgtatctcggtgaagggggaagtgtcgaactgcaagtaccattcatcgggacatatttacttcacactgaaggacggcctgggggctatccaggcagtcatgtttgccgggaaaagacgcgggcttaatttcgtgctggaggaagggcagcaggtggttgtcaagggaagcgttgaggtgtacgagagggacggacggtaccagctttatgccgccgagattacacaggacggcacgggggacctgtttaaaaggttcgaaaagctgagaaatgaactggaagagatgggcatgtttgcccctgaatacaaaagtccgattccgaaatacgcgatgaaggtgggtatcgtgactgccagtacgggagcggcaatccgcgatatcataaatatagcccggaggcggaatccctacgtgcagctggtgctatgcccgcacaggtgcagggagaaggagcggcgtccagtatcgccagggggatcgagaccttggatgcgatggggcttgatgtactgatcgtaggacgcggaggcggttccattgaagatttatgggcgtttaatgaggagacagtggcaagggcaatttttgcctgcaaaacgccggtgatatccgccgtaggccatgaaacggatgtgacaatcgcagattatgtggcggatctgagggcgccgaccccctccgcggcagcagaactggcagtgtttgattatgcacttttcgaaggccagttgagggaagcaggacagaagctttaccgtgcgctgtcgggcaggaaggagatggcggcctaccggcttgagcagtacaggctgcgtctgaggctctataatccggagcgccagctcaatgaaaagcgtcagcggctggccgatgccgaggagaggatggaacggctgctgaaacagaagctgaccgacagaaagcacaggctggcacttttaagcggacgcctccacggcctttcccctcttgagaagatcagcaaaggttttggctttcttaccggggaggacggaaaaagggtggaatcggcagagtcggtgaaagccggtgatcatctgctgatacgcgtcttagacggccggattgaagcggaagtggtgaaggctgagaaaagcggtatataataaaaaggataaaaagaatggtgagccaaatggatagaaacgaaaaagacgaagcagtgatgaacgaggcgggggaaacacaggaagccccggctgataagctttccattgaggagatatttaccgagctggacggcattatcagaaatctggagaacggtgaggtttcattggaggattcttttaaatattatgaggccggaatgaagctggtaaaaacctgcggcggaaagatagacaaggtggaaaagcagattctggtgctgaatggcaataacacggaggatgtgagatagtgatgaacgaacagcttttacaaagtacggaggaagtggaacaggtagtttactcgtatctgccggcggaggaaggccatcagaagactatttttgaggcgatgaattacagcgtcaaggcaggcggcaagcgtctgcgccctctgctgatgagggaggtctaccgtcttttcggcggaacaggcaaagagttagaaccttttatggctgcgatcgagatgattcatacctcttccctgattcacgatgaccttccgtgtatggataacgatgagtaccgcagggggaaaaagactacctgggtggtttacggctatgatatggcggttctggcaggcgatgccctgctcatctatgcgatcgagacggctgccagggcattccagatgacggataatgcgcagagagtcggaaagtgcatcgggatattggcacagaagaccggaatttacggcatgatcggcggtcagactgtggatgtggagctgacggacaagctgattccaaaggataagctggactttatttaccggctgaagacgggcgcgcttctggaagcggcaatggtgatcggcgccgttatggcgggcgcatccgacgaagagtgtgagacggtggagcggatggcggcagccatcggactggccttccagattcaggacgatatcctggatgtgacaagcagccaggaggtgctgggaaaaccggttctcagcgatgaaaaaaataataaaacaacttatgtgagcctggaagggattgagaaagccaaacgcgatgtggaaaaattatcggagacggccgtcgatatcctctattctctcccgggaagcaatgatttcctggaggacctgataaaggtactggtaagcagagaaaaataaaattacggttcacagctccgccgcacagcggcgggctatggccgtgaaccgtaattaatatagaaggaaaaagccatgattttagataaaattaatggacccgatgatgtaaagaagcttaatgagacggaattaagagaactggcggaagaaatacgctcgtttttaatagaaaaaatcagccatacaggcggtcacctggcttccaacctgggcgttgtggagcttacgattgctttgtatctggcgttcgaccttccgaaggataagattatctgggatgtgggacatcagtcctatacccataagatattaagcggaaggaaggacgattttgacggcctgcggcagtacggaggcctgagcggtttccccaaacgtaaggaaagtccctttgacgcttttgatacgggacatagctccacctccatatccgccgggcttggcatggcccagggccgcgatgtgctgggcgaggagtattcaatcgtttccgtaatcggagacggggcactgaccggaggcatggcgtatgaagcattgaacaatgcggcgcgcctgaagaagaattttatcattgtcctgaacgataataagatgtccatatccgagaatgtgggaggaatatcccggtatctcagcaatctgagggccgacgaaggctacaacctgctgaagaagaatgtagcggggactctggcgaaggttccgatgataggcaatgatttggtggataccctgctcaggacgaagaacagcatcaagcagttcctgatacccggcatgtggtttgagaatatgggaattacctacctggggccggttgacggccacgatgtaaagggactggccaaaattttcagtgaggcaaagaagattaaccatgccgtcctgattcacgtgatgacgaaaaagggaaagggctacaggccggcggagagaaatccgtccagctttcacggcgtggagccttttgacatagagacgggaaaaccgctgggacagaagttatatccgtcttacacggatgtattctccagggaaatctgcaagatagccgagacgaatgaaaagctggtggcagtcactgcggccatgcccgacggaaccggcttaaagcgtttttccaggctgtatccgcagcgctttttcgatgtgggaattgcggaggaacatgcggtgacatcggcggccggaatggcggcagccggtttgaagcctgtggtggtggtgtattcttccttccttcagcgcgcctatgaccagatagtccacgatgtctgtatccagaatctgccggtactgttctgcgtggaccgtgccggacttgtgggaagcgacggggagacgcaccagggcattttcgatttgacgtatctgtcgtcgatcccgaatatgagtgtaatagcgcccaagaatctctgggagctgagagaaatgctgcaatttgcggtggactatgaaggaccgatggcgatccgatatccaagaggccaggcatacagaggactgaaagagttcctggctcccgtggaatataaaaagagtgagattctctacgatgaagattcgattgcgctgctggctgtgggaagcatggtcagcaccgcggaacatatacggacaaagctgaaagaggaggggcattcctgcacccttgtcaacggccgctttatcaagcccgtggataccgatgtggtggattatttagccaggaaccaccgctgtatcgtaacgctggaggaaaatgtgctccgcggcggatacggcgagcggattaccgattatgtacagaagcattatcccgccatccgggtggtgaatatagcgctgccggatgcctatgtggagcatggtaatgtctccaagctgagaagcgatctgggaattgacagcgattccatcctgataaaattaaagaatgaactgaagagtgaatttccgggttcggaggaaaacagatgaaagaacgtttagatgtccttcttgtcaaaaagggcctggcagagtccagggaaaaggcaaaggcgatcattatgtccggcatcgtctatgtggatgaccagaaagaagataaggcgggcacctcatttgaggagacggctaaaattgaggtgaggggagcaaccctccggtatgtcagccgcggaggactgaaattagagaaggccatgatccatttcggtgtggtgacagacaaaaaggtctgtatggatgtgggggcgtcaacaggcggctttaccgactgcatgctccagaatggggccgtaaaggtctattccgtggatgtgggccacgggcagctcgcgtggaagcttcgaaatgacccgcgtgtcgtctgcatggaaaaaaccaacatccggtacgtgacaccggaggatattaatgataaaattgagcttgtatccatagatgtttctttcatctccctgaccaaagtgctggttccggtgaagaagctgatggcggaggacggacagattgtctgtctgatcaagcccagtttgaggccggaagggaaaaggtcggaaagaaaggcgtagtcagggagaaaagcacccatctggaagtgatcaacatggtgattgattttgccgtggaggccggttttgaggtgctgaacctggaattttccccaattaaggggccggaggggaacatcgaatatttactccaccttcagaatcacagggatggagaacattatgataacgtaacggtagacccggctcaggttgtggaagcggctcacagcgagcttgataaatagagtccggtaagatggcatgatgccgggagagcgcagaatgaaacatttttatctgattgtgaataaagagaaggaaaatgcggaaaagggtgcggagatgattgcggaatacctgtcccggcagggatgcgaatgcctgtgggatcaggaaccgccggacacctccgagtaccgctatacggacggccggaaggttccccaggagacggaatgcgtgattgttctgggcggggacggaacgctgatccaggcatcgagggatctggccggtagaaatctgccgctgttcggtgtaaatatgggccatctcggttatctgacacagatttgctgcgagagggatatcctgactgccatggatgatctgctggccgaccgctacaggctggagcacagaatgatgctgcagggacgtgtgatttcagacggcagaaccgtagccgaggatattgccctgaacgatattatattaggaagaatggggcttcatacactgaaatacgatctgtatgtcaatggggaattttttaatgaatatacggctgatggaatgattatggctacaccgaccggttcgacggcttataatctgtcggcgggaggcccgattgcggcgccggaatccgatttgatcatcatgaccccgatctgtccccatacgctgaactccaggagtatcgttctctcttccgaaaacaggattatgctgaaggtaacagggggagaggatcgcgaacagtttttaagctttgacggcgatacggttgtaaagcttagaagaggggaccggattgaggtggagcgatcagaaatcacaacgacgctggtgcagctcagccaggtttcatttcttgagaatatcaggaaaaagatgaagcatatataggggcggcagggtaacagttcagccatgatgaattccgcgaggtgttttcgctgctttttgcgaaaatcccgagttaagcggcgagaaacggcgttttttgccgtttctgtgcatcatttgttgcagtttggccgaaggctgaactgtaacgcggcagttatcagacagagtaattatcagaatgcgccggatatccggaggcagctggtatcaaggtgtatcagacagaatgatgtatcagagcggaggatagtttaatgaaattggaacgtcacagcaagattgtagagttgattgggaaatatgaaattgaaacgcaggaagagctggcggaatatctgaacaaagagggatataacgtgacccaggccaccgtatcccgtgatatcagggaattgaagctgtccaagatccagacggagaacgggcgccagaagtatgcggtgtttcatccgcagacggcattcaatgacaaatacatccgaatactccatgacagctttctttccatggatatggcacagaacatactggtaatcaagacggtgtcaggcatggcgatggcggtgggggcggctctcgactccctgcattttggagaaatcgtcggctgtatcgcaggagacgacacggtaatgtgcgctgtgcggactgtggatgacacgatagtattgatggataagatcaagaagctcatagctggataaggggtgatgggatgctgtttcatctgtatgtgaagaatctggccctcatcgactctgcggaagtggagttcgatgacgggcttaatatactgaccggcgagacgggagccggtaaatcggttattataggctcggttaatgtggctctgggcgccaaggcgtcgaaggatctgatacgccagggctgtgacagcgcctatgtggaactggtctttaccgtgaccgacgaaaaaaaacggaaggaacttgaaggtctggatgtgtacccggacgacgacagtcttattatcatttctaaaaaaatcatgcctgccagaagtatcagcaagattaacggggagacagtgacctcggccaggctgcgggaaattaccggacttctgattgatatccacgggcagcatgagcatcagtctctgctatatcatgccagacatctggagattctcgacgaatatggaaaaacccggactgccggtttaaaacaaaaaattgcaaaagagtaccatgcatacatagaactcaggaaaaagctggagtcgctgaatctgaaccaggagcagaggcttagggagatggatttctgccgttttgagatcgacgagattgagaatgcggatttaaaaccgggggaagaggaggaatgccagtcggtttaccgccggttttccaatgccaagaggatcacggagagccttgctcttgcccatgaagctgtcagcacggatgagatttcaagggctttaagggcggtggacgatgcgatgcagtacgacgaggagctgatgagcatcagggaccagctctatgatgtggattcccttttgagtgatttgacaagggagatttccgcccatctggaggagatgacgtttgatggggattcctttaatcaggtggaagaacgcctggatctgattcgaaacctggaaagtaaatacggaaagaccattgaggatgtccttaaaagcctggaagagaaaaagaagaagctggaggagcttgagaactatgatttactccgccttcatacggaaaaggagcttaaggcatcggaagacaggctggaagaactgtcggccgccctgtctaagctgagacaggagattgccggtgaattatcggacaagatcgaggacgggcttaaggaactgaatttcctggatgtgaagtttgcaatggaattcagacggttaagccattttactccggccggttacgatgaagcggaatttatgatctccaccaatccgggagagccggtcagacctctcggcatggttgcctccggcggtgagctgtcgcgcatcatgctggcggtgaaaacggtgctggccgagacagatgatattcccaccctgatttttgatgaaattgataccgggatcagcggccggacggcccagatggtttcggaaaagcttcgtgtaatcgcccggagccatcaggttatctgcattacccacctgccgcagattgccgccatggccgacagccattttgaaataagaaaatcggtggaggagggccggacgacgacaacgatccgcccgcttgacagggagcagatgacggaggaactggccagacttcttggcggagccgagattacggagacggtaaggcagaacgcgagggagatgaaagagctggccgacggtaagaaagggctggcagtaagatgaagttagatttgaacgatccggggcttaatctttacctgagggtttacaactattacaaagatttaatctgttccggaaagatgcagccggggacaaggctgccctccatcaggaaatgtgcaatgcagcttcagctttccaggaccacggtggagacggcgtatatgctgctggcggcggaggggtatatcctgtcccgtccgcagagcggctattatgtgactgagatactgaattccggcccaagggaagcgtggaagccgggcggcaaagagacggacgggcctaagatacgttatgattttgcatcctccaacgtggatcgcgacagcttccagttcgatctatggaggcgctatattaaaagttccctccgccaggatgagcgccttttatcctacggcgagcctcagggagagagggagcttcgggaggctatctgcagttatctgggccgccacaggggtgtggtctgcactccggagcatattgtggtgggggcgggtgtgcagagccttctgcatatcctctgtccgatggtgagggacaggaagaatgcatatttttacaatcctggtttcagacaggggcgtacgatttttgaggacttcgagttcaggaccgggggaatgcgcagcgccagggaagcgggaggaccggattccggcagcatctgctacctgacgccttctcagatgacggtatggggcgaggtgatgcatattacggagcggatggatttgctcaaagaggcatttgaaaaagacatcctcattatagaggatgactataacagcgagttccggtattataacaggccgactccatcccttcaggggctggcaggcgggcgcggagttgtgtatctggggacattttcaagacttctgcttccctccatccgaatgagcttcatggtgctgccgccggagcttcttccggtatacagggagcggagccgttattataaccagacatcgtccaagacggagcagattgcactctgccagttcatcagggacggccacctggagagtcagattcgcaaagccagaaaactgtacaccgccaaggcgaaaaagctttgtgaggatatcggcaggatattcggggacagggcagttccccatctgggggaggctggatttctggtacttgcggagatccggacggagcttacttcggaagagatagccaggaaagcggcccatgccggaatcgctgtccgcgccgtggttccggaggagggaaaaaggggggagagtatgaacccgagaattcttctttcctgtgcgacggtggggacggagcattatgaggaggcgctcacggagctgtacgacagtatttttggataaccgcaggtacctcatgaggagcttaagcaaggcggcatagattgaaaataaatactgatgagaagggaagaagtgaatgtttttctcatttttacagtggctctttattgttttattaatactttacctttccctctgcctttttggggataaggcaaagactgtggcagtaatactgattgcagccgcggttatctgtcaggtgtcgtttcatactttttcttatttcagatggcttggttatccgtcaccggctgaatttgtcatgaatttgtccgacagttatcccggccattccgtggaatgcctgagaagctcaaagatttactacgacggaatggataagatttttcctgactgctacaaagatttcttaaatatatacggggagccgctgaaggaagagagagaagacaataacctgacggttgattacggcggtttcagggcatggttctacttaaacggagacaattcttttctgcaaagggtggagataaccggaaaagacatatgcctgccggtcagcaaaatcagggttggagattccgggaggaaagtggaacaggcttatcagtttagcgaagtagtggaggaggacgggagccggtattatctggaagactgctgtatgctctgcaacgtgcagaaacgttaccggatccggtttgaatacgacacagcggatcaaacagtgattcatataggaaagaaccgcggagctgtgtcgcggatttatatcgatgtgtgctggctggcctgagaagttctggaaaactttcctgtaaattaagaaagaatcacgctcgcaagagtcatgcccgcgggattcgcaaaataatattgagtaaatagacagtatagagaaaacatggaggatggcaacgtaaggcagccattctccatgttttttaggtgcgccgctgaagctggaaattgtgaagcacggttaatggggctgaacagtttcgatatttatattaaaggactactatggctaacgttataaccgccaaaatggaaaatttattttgtgaacatttggagcaggatgcacctctttgcctgttccttttatcagatggaaaaggatatagcaaaactggcggatttgttaggacacagcaatatcaatacgacaagaatctatataatctcttcgggaggtgaacacaggaaacagatagagagaatgaatttgttattatgatgtaccacataatactgattatgtggtattatttcctacaataagcttatatcccaatttcaatataatcttattataattttcctatttggtctatggttattatatcaataaaggactctaaattcaatgttttaatatgttgtacaataatcttcgtcaaaatcaagagagttcctccattgaaatatgaaatcatatccaaattaaaattttaagattatctttaatgggaaaagtgcgtctatatgattggtaaatttatccatataagagtaaaaagaatggcatatccatttgtatcttcacttctattctgctccaccccctcagattggcggagttccccctaataacttcaatcgaacatgcaataataccacataatcagtattatgttgtattactgatgaacagaaaagaaatattcagcatttttctatttatgtttataactgtctggacagattttggctgcacagtctcctccgggaaagtctccataggagcggtggtgtaaaatgcagaattacctggcaaagcagtacgtaataaacgggggagatgaaaaaagtgaaaaattctggtaacggtgttttggagatacgtatgttaggagggttttctctttcttatgaaggaaaagactatgttctgggaagaaacaacacggcaaagtttattcagcttttgcagctcgtctggatgcagggcgggaaggggatacccaaggatcggctgatacaggctctttatgacagggaaagccagttcaatctgaataacagcttctataatctgatataccagatgcgtaaacatatgcatcgtctcggacttccggaaattgattatatcatacgggacggcggatattatgttatggatccgaaactgccggtccgggtggatgcgctggaatttcgttctctgatagaaaaagccgatatggaagcagacgaagaggcaagattccaggtttataaaaccgcttttgaattatataaaggagaactgcttcccgctatttcgacggaaatctgggttacaacggagagtttacagtttaagaatatgttcgaaagatgtacggaatggctgggagaatatctgaaacgtcaaaaggattacaataccatgtatcagatatattccagggccgcagagatctacccttttgatgagtggcaggtataccagatcgatgccctgctctgcaaaggtgagtacagggaggcttttgttttatatgataagacggcgcgcttctattctgaggaaatgggactgccgccttccgataaaatgatgaagtgttacgcccaaatgagcagtaagatcgaatactgtcccggtgacctgtctgaaattaagaatcacttagcagaaaacgctaaaaaaacaactggtgaaggggcgtatcattgctcttaccccagctttatcgatgcctactgcctgctgagacgcaatatggagcgtaccggccgttctatttatctgatgctctgtacggtggtggattatgaaggaaagatgattcagaatcaggaaaaattaaaagcgcgctccgaggcactctgcgatgcgattcgtgtcagtctccgccagggagacgcttttacgaaatacaacaattcccagtacctgatcctgctggttggcacgaaacaggaggattgtcagatcatctaccgcaggatcagccggaatatgaaaaagctgtccggtccgagagcggaacttaaatataatgttatttcattggcggaactgccggcttaggcagaactgacattaacaggtacgcttcgcgcaccggttgtaataccttcttcaattaatacagatatggcgtatggttatgcgtgagcataccagttatagcgtcatatctgtttttttcttacgaaatcatgtcaaaaaacaaaattctttctttctgtgaaggttcgtatgagatcccatttgttaaaatttgcctatgaggtgatttatgacatgaaagagaatataaataaaatttttgcgccgaatctaatctgtgtctgtatcgatacggtagagaatggcgactatataggaaaattctggcaccaatatgatgataaaccgagaagcttccgaaatatgacagaattactgcgaaatatggaagctttatacgatgaatgggattttccgcaaaaatctaccatactgcgaagctttaataataagcggggagatgccggcctgcgtcagggaagaagagatgcagaatataatgcccggaggattgaaaacaaacatggagagaagggaacctttgtcatctacgtcaagtaccggcagaatgccacctggcagggggagatgctgtggttggagggaaacctgaaaataagtttcagaagtgttctggaactgctgaagttaattgacagtacctttgaaatcgggaatgcggagacgacactggcacatggataatacaaaatctcataaattaacacgtaataacaaaaaaaacactttttgtgagagtttctaagatccatgatttggtaaagtacagatatgaatgaatagagctatcaaaacagtgacaaatgccgggatgaggaggaacagcatatttatgggtgcacagcatgaaaaaagaaaaataaaaggcacattcattgtcaatgtaatgttccgggaaaatgccacctggcagggtgaagttgtctgggcggatgaaaaaaagaaacaatatttccgcagcgcactggaactgataaagatgatagatggtgcattgaattcggaagaagagaagatgcagacaaagacggaaacggaagaagattagtcgttggggatagagaacaaacaggttgaggtgaagagcatgaaatggatgaagaaaaaatttaaaagaagtcttgcgatgtttctgacagtttgtatgattttgacatcatttcaaggagtcgcttttgcggatttagattctaccgctgaggacagagacattttgattgaactggatggagcagctttgaaggctgaggcggaagcagccatccgttcaggtgaactctataatgcacagttaggatttcaggagctggaactggctgagagttcagacggagaagagaaggtcaaattggtagactctgatgcatattcagatatatttgatcagagtaccggcagtatctatatgttgaaaaatgtaccttatataaataaggccagcgcgtctgacgcgatgcacaaggatgcggagcttcaggtatttgttaaactgaacggccaggcagcagaagcggccagcgggagcagcgcattaaaagcatctgacagcaacttaagaaaagcttcggccagcgacatcatcgttgatacacagaattacgagatgaagggcgacgaaaaaatcatttttctgtttattaaccgttccgaagcagatttaacattccagcttgatatcgacggaaagaagagcgcgttgattctcgttgaaagtaagagtgtacttttgtcagaggatgagaaagagaaggaagagttaccgccaattattcctgagataccggccggcggcgaagcaattgaaggcggagatgcggcaggacccggcggaagttcaggcggcggcagtggaagcggctccggaagcggtatcacagaggacaatggagataatgacacaacgatagaagacggaaatcagggaccggaagaggattccggcaatacaacaggagattccactccttccacaggtgatgagggacagaccggaaccggggaaggcaataacagtgaaacagaaaataacggcggcggagacagcgctccggcagagggagaaactcagacaaagccggaagacggacaggatggaaatggaaccggcggcagccagaatcaagaaggacagggcaatgagagccagaccggcggtcaggaaaatcagggcggcaacggcggaagtgcggaagataacggttcttctgataatggaaatacagacagtggaaattcttcggagagcggaagcggaaccacagataatggatctgcaggaaacgtaaccacaggtgacagttcctccgacagcggctcgaccgacagcagttcggcaggaagcggctcgaccgacagcggtttggcaggaagcggctcgaccgacagcggttcggcaggaagcggctcgaccgacagcggttcggcaggaagcggctcgaccgacagcggttcggaaggaagcagttcttccgacagcggtttggcaggaagcggctcgaccgacagcggttcggaaggaagcagttcctccgacagcggttcatcaggaagtggcggagacgtgcaggtttcaatttcttctcacagcgtggatcgggtgatggcattcgtaccgcaggattcttatgacgatgacgatgaagatgccccgaagagtccggaagaagaatttgagatgatgtacggggatgacgatgaggaagaggaggctgacgaagaacagtacaacgacgatgtggaagtttattcttcagatataaacggcgtagatattccgtccgaagtttatccggtagtgcttgtaaagaataagaaaagagcattgctaagaatggcacggagcagcgcgaaacaggcggatgcatcggcagggatgatgataacgacgtatggcagtcttaatgcagaaagtacggtggactttaatgatttcaaagtaaacatgtataagtataataaagatactattaatgaaaaaataggaatgccaacagccaatgaagattcaaccaataaatttttactgtatgagaccagcggctataacctccagaattcatggctgccgacgtataacaatatgtcgcaagccaattatgattcagtcgtattccagggaattatggcatcaagctatggagctgatgggaagattagactttctgataagtatagtgcaggaaatttaggctccgtttcaaaactgtttcctgattcaaagggggagcagataactggaatatcctctgccaactatggagtgaaaatcggggacggcgtgtttaataaagtcgacaactactatgtgttaaactccatagatgcaaaatttgcggatgacagtgaatacaaaggtgaaaatggagaatcgtcgagtattacgttaaacacaacgaacaataccttgacaggccgggcagtttcaggagacagcagaaaaggctttttcccatatggaaacggagtatatacatttggcatgaagctgtcatttgattttaatctgcctgcggacggtatggccacagagcaggaaccgatgacattctcctttgccggcgatgatgatgtatgggtttacataagagagaaggactcggcgaaatctacaagcagactggcaatggatcttggcggaattcacggattgtcaaaaggaacaatcgatttctccaccggtattgtaaagcatggggatgtatttactgggacaaagacaaatccgtctcatggagaagtggattggtatctgtacacccaggaagatttagcgaatgacatcaggcttacagccagccaaaagagaaaacttcaggagcattgtgtcggtttagagaagccgggaaatggctccagcggaaattacacacttgatttttactatatggagcggggcggcggaaattctaactgctatatggatttcaatcttccggtaatcccttcacagggagtgaaaatacagaagaaggttcagggagagcttccggcaaacagcgagttccagtttagagttataagcgcagacgatagaaagagtctggaagagtaccagaataattcatctgaaaatgccaatattacaatccagtcagttaagctggctggcgttagcgaaactacggtagatattccggtcggcaagtatttttacgtcgatgaggtgcagtctcagggcgcgaaagctgtaaaatgggaaatcagcagttcgggaacaggtacatacccgcaggtttcaggaagtaaaacggaaatatatgaagtgacaaaggaatcacagggttacctgcttcagtgtacgaatatatacggcgagttaaatccgcaggttgcaaaacgggcctggaaggattacacggcagacgatgagtatgatgtgacactggaggtaacgggcgattcgattcagacgacgatcggaggcggaacggcagatattgtatttgtcatagataaatcgtccagtatgaacgattgggatgactctctcaaggattacagatggaacaaattggagtcaacggtagacaggtttattaacaagctgaaaacaacaagtccaaacagtaaaatcagctttattgaatatcagtcaagtgacttgggtacacgccaggggacatatgatgacatcaggaaggttgcggtggcagatactgaaagtgcagataaaaatctggaaggaaataaactgaaatatttcaggaccttacagaaatggactgcaatttccgaggtgggttctaatccttatggaagtaagcccggttctggtcagggtactcacagtgcaggcggatatttaggagccgagagagcgttagaccgcttaaaaacttataacccggatgagtataacagtaatgccaaatatataatttatctggccgacggtaccgctggttattacgtaaataatgatggaacccgggccggctctggcagcggtggtaacgcaaatgcaagaagagcggctattacgcagagcggagagttaaagaaaaagcatcctgatgctacgatttacacggtggcctttggttcagactccagtgccaatatgaactggatgaaaccgggagcctataatgggaacagtgataatccgtataacccgaatgtcacagcattctatagcgctgcgaatacaaaagaactggaggagacttttgataatctggcagcccaggttggatccagtgcggtaactaatcctaaggtgaccgacattttaagcggccatgtaatgccggcaggaatccagattaatggaactacggttgcagctcctgaactttactatggcaccagctctattacgggaacgagcgccgatggagtgcagactgcagcagataagggaacaaagcttacagccgtattagcagatgcagataccgtcaactacattaattccgatgggaaagtaattgctgtttactctatctctgaaaagcagattgactggaatgtggcggatacccttggcaaggacgagaaacgggttctcacatatcgcgtgaaggtaacaggcgactatacggcagattaccctgacgaaggagacaacggaacaggaacccacagcggtgagagtggttataattccaacgagagcgctgtcctgacatttgaaaacgggaatgatgttactttcccgcatccggtagtgcaggtaacgccttccacactgacagtcagcaaagaagtttcaggcattgatgaggcagccgccctggatgcggattacagcttcaccgtgaaattcgaagacgggaaacagtatactgcacctgaaggcgcagtctggaacaatggagcgtataacttcacattaaaagcaggagagtcaattgaatttaccggtttgccaacaggagtgaagtatacagtcgaagagaccggagcgaatcatgtaaatgaagattatgttctgacccatatcagggcagaagggaacggaacagagagcagggacagtacagaactgagaccggagggcctttctactacaggaacaattgaaaagagcggaagtacggcagactttgttaatacctattcggaatatggctatattacagtgataaaagaattagccggagatgaaaccgcttatccggatgataaggaatttaagtttgttattactcctccggaaaattcagcaggtaattatgatacggaaattgctgtaacggcaggagaaccatccggtgctaagctcaaagtagagcctgaagacaaagataacgcttttacaatcaccgaagctgataccaagggagcgtggaaaacgacagcccaggttggcacagtggcagaaaagaccggactcagtgcatcggcaaaagcgggagagacggcaacgtttaaaaactattattataagcgggaaatagaactgacaaagaagcttacaaacagtgaaaacccgtctccgaatgcacagtataagtttgatgttacactgaagacaaaagacaataccgcacttaatgaaacggatattccttttagaaatgacggacagagactggatgggtttagcaggctggaggacggaacatatttcttcagcgtgatgcttaaagcagatgagacagtgaagattgtaaatattccaaaagcagtcgagggatttgtaattacggaagatttggcaggaagtactggaatcgatgtgaagtatcggccggaattttattcatcaacgctcaacgaagtggaatcggtcggcgctgacaaggtatcagttacctataaggaagacgaaagccggtccgacgccattataatcacaaacaggctcgctacggcagagggaatgctcagcattacaaagaatcttgtaaaaggttcgacggcagactcagagccggtaaaggcaaaagagaatattacatttacctttaaggtgaccaatacggatacaaaagaaagtttttacgtatcggtgccggtcgaaaagggcagcccgaatgcaacaaaggtacttaaagtgccggtgggcagctacgtgattgaagagataccgtatttgcagtatacagcagttgatgataccaaggaagcctctgtagtacctgggactgagcctggtgctgacgccaaagtggaattccacaactataagagcggtgaaggttattttacagatgtgaaggttaaagtaaatacggtagacgagggtggattcccgacagaaaacaacagcattccgaaacgtgaagcccttccgcttgcagttcttttcacaggaagcagtaaagcggaggaagacgacagcaatgagaactagtcgcggcaaataaaaatagaaaggcgagtagggatcatggtaaagacagtaacaaaaatatgtaattttatatcagtaataatggtacttatcgtgattgccatcggtgcagtcatgatagtaccgaaggtaatgggcaatgatatctatgctgtcatgagcggcagcatggagccatattaccatgtgggaagcgtggtaatcgtagataagcatttcaccccggaggagatagcggtcggtgaccctatcaccttccggaagggtgataatgcgatagccactcaccgtgtaatcgaggtaaatgaagagacgcgggaatttaagacaaaaggcgatgccaatgaggtagaagatttagccccggttccatttgaaaatgtaatcggaaaagccggtatgtcggtgccaatggttggatatattccgctctatatgcggacaatgaaagggattttctgtataggcgcatatatcattgtatttatcctgctgcagatcataccggagcttctaaagccggaaaaggaggaggagcagtcaagtgaaaaacaaagttaagtggttgaaaagaccgatgcatttcggtttggcattgctgctaatcgcaatccttacaatcggcacaaccattgcattctttaccgatattgaggcggcggttaacagtatcacaaccggtaaaatccaaatcgatattaatgagaaggtagatgggcttacaaagaatgacatcggagtgagagcagccggaaaatcggaatgttatgtcagaatcagggcggatatcccaaccgtgacctacaagtacacggacagcgaagggcaggagcaggacggaagcgcctggattatatatcctggcaatgagagcggtgtgaatattgcagcatggaatacaatcaacgaaatgtctgttttaataacacgcgcaccagacacggaagatacgtctgcagtatggacccgcaaagacgacggatactggtatctgtcggaaacgctgaatcagggggattatgtggagtttctgacttcagttacctatcccggcctgatgagagacgggaaggtagaattgccggacggcattacattcgacatgctgactataccgattgtatctgaagccgtacaggccgaaggaatcgatgtgggcggtgcgacaggcgcagatgcggcataccaggcattccaaattgtaaacggcctgtaagaatggaaacggttattccgggaatgcccgggtatctgaaaaaggaagtaataatgattttagaatataaaaaaatagaaaattatttggaggtagaaagatgaaaaagaaatatgcacttgcattagcggcagcggcaatggttgggaccctggcagtaggtggaactctggcctggttcacggacacagagacggcaacaaatgtagtaacgatgggaaatgtggatattacgcttagcgaagccggcggagaagacggcgcaatcatagacggcggtttagaatatacggacgttatgccgggcgacaaattccagaaaacagttacaattaaaaataatgagaatgacgcatacgtcagagccgttattacagtaagcggagacgaggcagttatggctacctttggagatgagaaagcggaaaacgatattaaatttgcaggcctcgacgaaaatgcgaaatggaccaagaatgaggatggctcatacagcacaaccgtatattataaaaacagtgcctccaataacatcatgaccaatggcgaggatgtacttttcaccgtgtttacagacattcagattccgggcgaagaatgggataatgtttttgcaaataattctttcaatatcaaggtagatgcagaggcaatccaggctgccaacttaactgaggaagatgcatggaaggcgatgacaaagtaataacagataaagaagaagcttataaaagaattgtgaaaatattaaatgaaaaattcggaggtataaaaaatgaagaaaaaattagtcctttccttagcagcagcggcattagttggtactttggcagttggaggaaccctggcatggtttacagatactgagacggcaacgaacgtagtaacaaccggcaatgtagatattgcatggtttgaaggtgacgggaatgttgagaagaagattaccgacaaatataccggtatacagtttggaacagaaactccggttacacctggacagaatttagataaagaggctcgtattaagaatgaaggtaaaaatgctgcatatattcgagctaagattgtatttcttgagggtgagaatgaaattagcaagcctgagtatatggatataattggtagaaattcaaactgggaagagggtgacgacggatattactattataaagatattgtcacaccgggcaattggacagagaagattatgacggatatcacaatcgacccggctaaagcaaataacgagaattttgctgataaggaaatcacagttcgtttggacgcggaagctatacagtctgataatcttggcgataatgtaacaagctgcaaagcggcattcgagttgggcagtggtaatatcatcagttatgacgttgagaccgaggaataatactcttcgtttaatcacaataaaagctatttcaggtcaggaatccctctgttagggggagcgcctgaaaaccaaataaccatgattagcagcgagagaggtttgatgctatgaaaagaaatctattaaaacggataatggcgggcttctgggcggcggcattcgtgggaatgagcagcatgactgcactcgctgcagactcagttgatgtaaatggcagtggcagatacgccggcgataccgatgtcgtggtcggataccaggataaggatctcttcaccaacatgaaggagctgatgccgggtgatacgatagacaatcaggtggcgctctccaataagagcagccgggctgttaccatttacctgaaggcatatgctgactttaccagtgccgacggaacgaccgcggtcagggataagagtacggcgtccgccgacggcaagaccttccgtaacgatatcctggatcagatagagatgacgctgaagctcgacgataaggttatctatgagggaagcgccgacggagtgaagccaaaggcgggttacgagtcgatgacagccggtaattacggcattgctctcggaagctttgcggcaggtacacagaagaatatggtgattacactgaagcttcccggcccgacctttgacaatgatttcattgatacctttgatgcggtagactgggtcttctgtgttgagggaaccacaccctccggcggcggaggaggaggtggaggcggtggcggcccgtccggcggaggaaactccaacaatggaccgggcagtgtgacagagattattgattcggaagttccactttcaccctggaccggagaagacggcagtatcgtcatcctggattccggagttcctctggctaatatcccgaggatgggcgataccggcatcagcggatacatatttggtattctgctggccctgctgattgcagccggcgcactctatatgaaaaaacgttacagtgttcaaaagcaataatttttaaatacagagcagttttaattgaagagcagcggggggataagaaccgctgctctttttaagcttgggaggtagaaagagatgggcagaaaatttatgcagcacgtgtttactctgattgccctgcttgggatagcggcggcactgtttctcgggtataagctggtaaaaaaggagctggattacagaaagggccaggaagcccttgaagatgtctaccgggtgatggactctgccgtttatgaaacggaagaatattcaggcctcgatgcggcggaagagaaggaacggcagaatcgtctgagactggcacagtacgaggctctgaaccgccagaatccggatatgcagggatggattcgtatcgaaggcacgaaggtggactatccggtcatgtataccccagacgaaccggaattttatatcaaccggaattttgacaaagagaaatcctcctatggaatgattttcatagacggggactgccgggtggatcaatttacaccaaacattctgatttatggccatcatatgaaaaacggggatatgtttgccgaaatcgaaaaatacaacagccgtgaattccaggaagcccatccctatgttaaatttgatacgctggcagaaacaggaacctaccaggtgatcgcagccttcaagcagccggcttcccggctggatgaagactttaagaccatgctgctggcaaaagatgaggagcaatatgaaaagctgatgaattacttgaaaattcaccgtttttatgataccggagcggaggctgtctggcccgaccggcttatcacgcttaccacctgtgagtatacccagaaagacgggaggttctttgtggtggcaaagagagtggaatcatgaccctcttttttcctcatggggaagccggttgcgcacaagacgcttttttaattcactgaagctaaatggaaccagtggatagatatagctttttccggcaatcgtcttgttgaatatgaggcacaggacactgataacggttcctgcgataaagccccaaagattgaagaaagcggtcagcaaaaggagcatcaccctcatgaactttaaggcataccccagctcaaagcttgtctgggaatagtttgcaatggtgacaaaagccatatagagcatggtttcactgttgaaccagcccgatttaaccgaatattcgccgaggacgataccggcgatgacactcaaaggcgttgtcagcatactgggggtgttgaccgcagccagacgcaggccgtcgatggcaaactccagaatcaggagctggaatatcagagccacatggacatcgtcggtgacctggataaaggcaagccattcgggaatccagcccggattctgcataaagagcagccacagaggcgtcagaaacagcgtcagaaggaatatcagcattctggacagcctcagataagttcccgtaataggcggaaagtaatagtcgtctgcttcctcaataatgtcaaagatggatgacggcagtatcattgcggagggggagttatccacgagtataatgatattgccttccaggatagatgcagccgcagtatccggcctctcggaaaaacggaactttggaaaaggattgtaccatttatgcggataaatgcactccgccaggctttcctgattcatggtaagggcatccacatggagtttctcaattctgccttttattttagccagaagatcctcgtcaactcttccgtccatatagcagatggcaatatcggtgtgggagctttctcctgcattcataatctcgacccgcattttcggatcgcggatacgacggcggatcagcgccgtattaaaaaccagagtctcgacgaaaccgtccctggatcctctcagcactttatccttttccggttcgctgacgcctctggccgggtatgtgcggcagtctatggtgaatgcctgctcatatccgtcaatcagcatgcatggcacgccggacagaagctgggttaccaggaggtcttcctccgtctccagccctatctcgccgtatggcaggtacagcttggaaaattcgtgtgccgtatcaggcattgcctccggtttaatgctcccaaaggactggaggatacgaagcagcgtatcatcctttgtaaaaccatcaataaaatagatacaggcattccgtccgccgacgcggatgacacggtataccacatcaaagttgatatcgggacgcagcagcttttcaaagcgctgcatattggtctccagtttatttgagattttcataaaatagctcctctcatccagaattatgcaaatgaattttagaattatggaaagtatgtgtaaatttctaaaaattatgagtgaataagtccgcaggaaatcaaatataatatcgggtagtttcctccggcaaaaaagatttgtgcatattgacaggatttgattgacaaaaacagtataaaatgttatatttacataagcaataaactatttgatgtaacggttagtgaacgtgaccggaggaactgccttctgtgggggaaaggcggttcctttttttacatggcggtgaaaggtccgcagtatgcgctttgtaccgccaactataaaaattaccgtcaggaggtatagaatgagttccgaagacatcgaaaagaagggattaggagcggaagagagcaacaggatgtacgaaagcaaaggcgccgcagggcagcctgaaaatagagaagcagataatacggcaggagcagataatccgtcggaagaggataaagaggcggagacaggcgagattgccagaaaagcgcaggaaattaaagacagggccatgcagatacagaaaatgaaagcagtcagaaatgccattacatttctggcagtcgttatttctgctgttttgcaggcttttgttatacaggcttttatccggccggcggagcttttgtccggcggatttaccggtattgcaatcttagtggagatgctgacctctacatggggaataagctttcccacatcactcggaatgctgtgcattaatattccggtggcgattatctgcagccgcggcatcagtgtaaggtttacggctttttccctgttccaggttttccttaccagcggattcctgcaattcctgcattttgaaccgctgtttgacgacccggttctgaatgttatattcggcggttttttaatgggaatttccattgtgatagccctgaagggcaatgcctcctcgggaggaaccgactttatcgccctctatgtttcaaataaaacgggccgttccatctggggacaggtctttatcgggaactgtgtgctttactgcatattcggcttgttattcggatggatgaacgctgcgtattcgattctcttccagttcatatccactaagacgatttcgaccttccaccacaggtatgacagggtgactctgcagattacgacggagaaggccgacgagatgatggaggcgtatatccgggtctgcaagcacggaatctcctgcgtggaggctgtgggcggttacagcaggaagaagatgtatgtgcttcacacggtaatttcttcctatgaggtggatgatattataaggctgatgcgggaagtagatccccatgtaattattaacgtgtttaagacggagcagttttatggcaggttttatcatgctccgatggagtagagaggtttaacggatggatatggcacagagacgtgaatttataaggacagaactgatactgggaagaaccgggatggaaaagctgagggaaagtacggtggcagtctttggaatcggaggcgtcggctcccactgcgccgaggcgcttgccagaagcggcgtcggacgtctgattctgatagataatgacgatgtttcagtgacgaatatcaaccgccagtgcgttgcctaccacagtacggtggggatgaaaaagacgaaggtaatggaagggattatcagggaaatatgcccggatacgcagaccatgacttttgaaacgttcattctgacagacaatattcaagaaattttcctggcggcgggacgggtggattacattgtggatgcaatcgatacggtgacggcgaagctggcgctggcccagtatgccggggaggcagggataccgcttatttcatcaatgggaacaggcaataaactgcatccggaactgttccggattgctgatatatcggagacgtctgtctgcccgctctgcagggtaatgaggaaggaactgaaaagcagggggattcaaaggctgaaggtgctgttttccacagagaagccggtggaaccggagcctgagctggaagagcagcttatcagagaggagatatcggagaacagctcgcgccgttcggtgccgggcagcatcgcatttgttccgccggcggccggtctgctgatcgccggagaggtggtcagggaactggcatcggcgaggggaaaataataaggagggagaaaaagtgagtaggatgaaagggaaaaaagacggcagtgttctgatgacagagggggtaatctggaaacagctcgttattttttcgattccgttactgataggcaatctgttccagcagctttacaacacggtggattccattgttgtggggcagttcatcggcagtgaagccctggcggcggtaggatccagcacgcctcttatcaacctgattattggaatgttcatgggaattgctgtcggatccggcgttattatttcccagtattacggggcaaagagcgaggacaagatggggtgggcggttcatacgtccatagccctgagcatcatcggaggcattcttttatcggttgtgggcatcgtgttctcaccgtctattctgcggctgatgaagacgccgccggaggttctcgacacatctgtcctttatttcaggatttattttctgggttcgctgttcaatctgttatacaatatgggggccggtatcctgcaggcggtgggagactccaggcggcctcttatattcctgtgcatttcttctgttaccaatattgtccttgatctcctttttgtagccggttttcatatgggagttgacggcgtggcatgggcgacgattatctcgcagtttgtgtcggccgtacttgttatgtcagctttgatgaggacaaaagatatttaccggctggaacttagaaaaatcaaaatagataaacgtatgatgaaacggattctccgcctcgggatcccaagcggcatccagcagtccattatctccctctcgaatgtggtggtgcaggccaatgtcaatattttcggctccaccgtgatggccggattcggggcgtataataaggttgacggctttgtggtactgccgatgcagagtttttgcatggcagctacgacttttaccggacagaatatcggagcgggaaaaccggagcggattcgggaaggaattaagcagggaatgatcatctgcgtatcggtatcggcgctgatctctctgctgctgtttttcgagtcggagcgtgtgctttccattttctcatccgatcccggggtgattcacaacggcatgattacgatgcgtatcctggtcggattctatgctgtgctggcagtacatcagattcttatgggagtcatgcgcggagcgggcaaatcgatggaaacaatgctgatttccgtcggaaacatgtgcgtgctcagaatgatttacataaaattaataataccggtgtttccaagctacgaggctgttttatggtgttatccgataacgtggattacaacgattctgatggatattatttatatgaaatggggaaaatggaaggtaacagttcggctatgatgtattccgcgaggcgtttatttccgtttctgtgcatcatttgttgcagtttggccagaggctgaactgtaacaatgttaccgggagaacactaataaattgacattttctgctattgtatttaaaataagagattgaataaaatggcaatttgatttgacatataacctgcaaaggagacaatgaatatgaaggacggttttatccgtgttgcggcgtcaacaccggaagtaaaagtagcggatgtggaatataacagagagcagatctgctgcagaatcatagagggaagggaacgcggagccaaaatcatggtatttcctgagctggttctgaccggatatacatgcggggagctgtttaaccagaaaccgcttctcacaaaggccagggaagaattgaaaaaactggtggattttacggcaggaagcgacatgctggtatttgccggtgttccgtgggagtataataacaagctctataatacagccgccgccattcaggacggggagctgcttgcccttattcccaaaatgtgcctgccgaactattctgaattctatgagctgcgctactttaatccgggatttgaaaagccggtggcagttccctgggaggacggctatgttctgatggggagcaaaatcctgttcaactgtgccaatgtggagaacctggtggtgggagcagagatctgtgaggatgtctgggtgctgaatccgcccagtatcggccatgcttcggccggagccacggtgattgtaaactgttccgccagtgatgagacgacaggcaagagcgattacaggaggagccttatctcgggtcagtcggcaagactgctctgcggatatatctacgccaatgcaggtgaaggagaatcaacccaggatctggttttcggcgggcagaatattattgctgagaacggtaccatgctggcagaatcgcgccgctttgaaaatgagactgtctatgcggacatggacctggagcgcctggaatgtgagcgccgaagaatgactacctatcagacggcggggcgggaaaattatgtatttatcgactttagcctgcatgaggatgaaaacaggccggagcgttttatcgacccatccccatttgtgccgcaggatgaggagagcaggaacagaaggtgtgaggagattctttccattcaggccatgggacttaagaagagattaaagcatacgggatgcaggagtgcggtaatcggtatttccggcggactcgattccaccctggcgctgcttgtcacggtcagggcctttgatctgctggggcttgccagggataagattatctgcgtcacaatgccgtgcttcgggacgacggacagaacctaccacaatgcctgctatctgacaaaaaagctgggtgcttcccttctggaggtagacataaaggatgcggtggcaaaccatttccgcgatatcggacatgattcttccgttcatgatgtgacatatgaaaattcccaggccagggaacggacccaggtcctgatggacatcgccaataaatataacgggatggtgattggtaccggcgatatgtcggagctggcgctgggctgggctacctacaacggcgaccatatgtccatgtatggagtcaacagctccgttccaaagacgctggtacgccatctggtaaggtattttgccgatacctgcggggagaaagagctttcggaggtactgctcgatgtgctggataccccggtcagtccggaactgctgccgcctgagaaagacggaaagatagctcagaaaacggaggatctggtaggtccgtatgagctgcatgatttttatctgtactatattctgcgctacggctaccatccgggaaagatttaccgccttgccgtcatggcttttgaaggagtttatgataatgcagtgattttaaaatggctgaaggtattttacagaagatttttcagccagcagtttaaacgttcctgtcttcccgacggtccgaaggtcggctcggcggccgtgtctccgcgtggggatctgaggatgccaagcgatgcatgcagcaggctgtggctggaggagctggaacagattgaaatatagttttatggtcattacggaggacacagatgataacgagtaccggaaataaccgagtgaggtcggtatctgcgctggcgaaaaaagcaaagatacggagggaacagggactgtttattgtggagggggcaaagatgtttgccgagctgccgaaggacaggctgaaggagacatatgtttcggagagctttctgaggcagcatggtgaaaaggcgtcggagcttttacaagggatctgttttgaggaggtgtccgacgatgtaatgaaatatatgtcggatacacagacgccccagggaattctggcggtggccgctcagctttcccattctcttaatgaaattgtgaaaggggatgggataaagaggaacagtcctgcccacctgatgattcttgagacaatccaggatcccgggaatctgggaacaatcctgcgggccggtgagggcgcaggaatcaccggggtagtcatgaacagtgcaacggctgatatttataatccgaaggtgatacgttccacaatgggttctatctaccgtgttccctttgtctatgtggaagattggcagcaggccctcggcaggattaaagcggagggaatccggctctatgccgcccacttaaaggggaaggtaagctacgagaatgaagattaccgtacggatacgggatttctcatcggcaatgaggctaacggacttacggaggagacggcggcgatggcggactgctatgtcaggattccgatggccggtcaggtagaatccctcaatgcggctgtggcagcctccattctcatgtttgagactgcacggcagagaagaaattaatatttaataaaatattagtttttagtttataaatgagtaataaaaatgtaagtttagaatattctgccatatgttgctaaatgtctgaaaaaatactataatagtatcaaggagtatttcctttagttaagaaaggagaagaaagtatggcatggataatctggctggcagcttttgtgattctgatagggatagaagctgcaacaatggcgcttacgaccatctggtttgccggaggtgcaattatcgcttttttactggctttactcggagcaaattataatgttcagatggcggcattttttattatttcctgtgcgctgcttttctttacccggccctttgcgctgagattcgtcaataagaagacggttaaaaccaatgtggagggactcatcgggaagaaagccagaatcacggccgacgtggataatgatctggctacgggagccgctgttgtgtcggggcaggagtggacggcgcgttcgtccgacgggaagccgattaaagaaggaactatggtaaagatagacgcagtcaatggggtaaaattgattgtaagcaaagttgaggaggagtaatagcatatgggagcatttataagttttgtcattcttgcgattatcgtcctgctggtactggcatcatgcatcaggattgtaccgcaggcacaggcacttgtcgttgagcgtttaggagcttatctggaaacatggtctgtaggcattcattttaaagtgccgtttattgaccgggtggcaaagagagttcttctgaaagagcaggtagtggatttcgcaccgcagcctgttatcacaaaagataatgtcacaatgaagattgatacggtagtctttttccagattacggatccgaagctgttcgcatacggggtggagaatcccatcatggcgattgagaaccttacagctacaacgctccgtaatataatcggtgatttggagcttgaccagactctgacgtccagagagactatcaatacaaagatgcgtgccgcgcttgatatcgccaccgacccgtggggcatcaaggtaaaccgtgtggagcttaagaacatcattcctccggcagccattcaggatgcgatggagaagcagatgaaggcagagcgtgaacggcgtgaagttatcctgcgtgcggaaggtgagaaaaaatcagcgattctggttgcagaaggccagaaggagtcggtaatcctggaagcagaggcagagaaagcatcagcaattctccgtgcggaagcagaaaaagagaagaggatccgcgaggcggaaggtgaagcggaagcgattctcaaggtacagaaagcgaatgcagacggtatccgctatatccgggaggccggagccgataatgcggtactccagattaagagccttgaggcctttgcgaaggcagcggacggcaaagcgactaaaatcattattccctctgagattcagggaattgcgggcctcgtaaagtctcttgcagaggtcggaatgaaggacgacagtaacggcaacgcgtaataggcagcaggaataatagaaaaccggattagtccgaggcagtcaggaaatgctcgaggcaatccggtttttcctgtacaggtggaacaatggagaatgagaaaaagccggaaagcagccggcgcaggatggtcaggaaagtcaacctgggccaggataagattaaactggatttatccagagaatacgggctggtactggaaggaggcggagcgaaaggctctttccagataggcgcctggagggcgctcagggaagccggaatcaagataaagggcgtctcgggcgtgtcggtaggggcactcaacggggcgctgatttgcatggatgatccggagaaagcggaggatatctggcataatatcaattattctgcggttatggattttaatatgaacaccggcagtatcctggagacggccgaggaaattaagaaactgattaaagaccgcggagtagatattacgcctcttaaaaagctgctgcatgaaaccgtagatgaggaaaagatcaggaattcccattgtgaactgtttgcaacgactttttcagtatccgatatgaagctccttaatatagacgtcaaatctgcatcagagggtaagatggaggaaattttactggccagcgcattcttccctgtttttaagacggagaagctgagcggaaagctctatacggacggcggcggttttaacaatgttcctctcgatgtgctggttgaccgtggctatcaggacgtgatcgtagtccgaatctacggacccggctatgaccgtgaaaagaaagtaaagataccggaagggaccaatatctaccacatcgcccccagggaagagctgggcggagtgcttgaatttgacaaaaaaagaagcaggaagaatatggcgcttgggtatctggaggcctcgcgcctcctatacggcctggacggacggagatattatatctatgccccgtatgaggaaccatattattttgacaggatgatgtctgaactggaactcttaaagatttatctggaatctgtcctggatgaagaggcgcttgcttatctcgacggataccgtttttataccgagaatgtgttcccggagctggccagggagctcaagctgaagccggattgggattacaaggatatgtatctggcaatactggaggagcttgcagttacttttaaaatcagccgataccgtgtttacaaagcggatgaactggcccgggaaatccataaatctttactgaaagctgacgggagacttcctttagcgggtgaggaccccgccggtccggccgcgtcctccaaccacaactaaatatttttttgacaagcggccggtatttatgtaaaataagaaggatctgaagataatgcacgaccaaaacattaaaggagagaaaaggatggtaatacaggaaaaaaagagaagcggaagagtctcttcttttgttttagacacacttcatgttattgtgggaatcctgatagtcatcctggcagttctggcttttttaaatccggatgagaaccggattttgttcccggccatctttcttctggccgcattgctgaattttgccaacggctatgatcgctttcataataacagaggaaaaaagaaaaagagatttgcaggcgcggcactgatgaccgcgggagtgggacttttcctgctttgtgtagttagtgcgcttacaatctggtgggggtaaaaacaagtgaagacagaagttttgcgtatgcttaaagaagcagaaggatatatatcgggacaggagatttgcgagaagttcaatgtttccagaacagccgtctggaaggtgatcaagcagctcgagacagaaggatatctgatagaagccgtcagaaataagggatacaggctgaagatggccggcgatatattaagcagggctgaaattgaaagcagtatgaatacgaaatgggccgggaagaaggtactctattttgacgagaccggttccacgaatacagaagccaagcaggcggctgaggcaggcgctcctcatggaacgctggcagtggccgactaccagaatatggggaagggacgcaggggaagaatgtggacgtcaccccgtggcgtgggcgtctggatgagcctgatgatacgaccggagattcatccgtccgccgcttccatgctgactctggtggcagccctggccgtatcggaaggaattgggaaaacctgcggcctggagactcagattaagtggccgaatgacattgtggcggacggaaagaaaatctgcggcattctcaccgagatgagcaccgagctggaatgcatcaattacgtggttacaggcatgggaattaacgccaatatggaggagcttccggaagagattaaggatgtggcaacttccatccttttgcagacgggaaagcgtgtaaagaggagccagctgataggcgcagtgatggagtcttacgagaaatattataacgtatttatggaatccggcaatatgtctgggctgctggacgtctacaacagccatctggctaatatgcagcgctccgtccgtgtccttcagccgggcagcgaatatgtgggtacggcactcgggattaacgatgccggcgaattgcttgtgaagacggaagacggggcagtccaccaggtgatttcgggcgaggtttctgtccgcggcatatacggctatgtataacagcgtactgttcccggccttattgaggcccggaggacgcgtacggaacggacttgtccggtgtggtgaggggggagactgagtctttcgtcccggcgaaaacctggctttggggcgtagcgtgcaggttatcgttttgtgaggcgcagaggaaattatggaatatctttatagtaaattaaaaacactggaacggccggatacgcctttaacagaagatgaaagattaagggctgtcaaagggccgctgcttcactggtatgacaacaacagaagaatcctgccgtggagggaagaaccggaggcctacaaggtctggatttcggagattatgctccagcagaccagggtagaggcggtcaaaccttattttgcacggttcatggaggcactgcccgacgtcataagtctggccgcggcagatgaggaaactctcctaaagctctgggaggggcttgggtattacagcagagccagaaatttaaaaaaggcggcccaggtaatagtggatgagcatggaggggtaatgccggattcctatgataagcttcttaagcttcccggagtcggcagctatacggcgggagccatatcatctatcgcctttgggatacccgaaccagcggtggacggcaatgtcctgagagtgatatcaagactgcttgctgatcgcggggacattacgaaagcaggcacaaagaagcgttatgagcttttaataagggataatatggacagggagagggccggcgattataaccaggctcttattgaactgggggctattgtatgtatcccggcagggaagccgctgtgcggtgaatgtccgatgaattccctgtgtctggctttaaaaggggaactgacggatgtgattccggtaagggctcctaaaaaaccgagaagaattgaagaaaagacaatatttcttctcgaatgggaggataaagccgctatacgaaagaggagtggaaaggggcttctggcttccctctatgaatttcccaatattccgggacatgcaggggaggaggagctttcagaagttctcgggcttccgaaagaggatattcttgcctctgagagactgcctgactcggtccatatcttctctcatgtggaatggcatatgactggataccgtgttaaaatggcaaaagaacatccggaattgtttcatatggtaaaaaaagaggaaatattttcaaaatatcccctgccaaatgcattcggagtgtatacaaaagctttaatgtgaaataatgagagggaaggcctatgaaaaaaatgattttcgtgttcaatcccagatcgggcaaggagcagatacgcagtaagctgcttgatatattggatatatttacgaaatatggctatgaggtgtcggtgtatgtaacacagaagccgttagatgccatgcagatcgtatcacggcgcgggagaggcaggagccttgtagtctgcagcggcggagacggcacgcttaatgaagtcgtatcgggactgatgacgattgaagagggaaaaaggcctgtcctgggatatattccctcaggttccacgaatgactacgcgtccagcatcggaatatcgaagaatatgaagaaggcggctctcgatgctgtcagcggcggaacgactgccgtcgatgtgggcagattcggggaagacagatattttgtctatgttgcggcattcggagcattcacagaggtttcctacagtacgccgcaggaggccaagaatcttctcggccatcaggcctatatgctggaggccgtgaaaagagttacaaatctgaaagcttacagaatgaaatttgaatgggaagataaagtgctggaggatgaatttattatcggaatgattaccaataccatcagtattggaggatttaaggggctggtcggccttgatgtggccctggacgacggtgaattcgaggttcttcttgtccgtaaacccaggacacccaaagatattgcaagtattgcttcttatctgattcttcgcgagggagagaacgactgcgtatatcagttccgggccaaaactttgagagtgatttcccaagagccggtagactggtcgctcgacggcgagtacggcggcagcagaacggaaattctgatagaaaacaagagccgggcggtgtcgattcggcgccgggcgtcgtctgttgtcgaagctttgtgaaaaactgagagaaaagcttagaaatatgttgaaaaaaaattttggttagtatataataaaaggccgagtaccaatttacaatacgcagctgttcagaaccggttattcagaataaagccgattggatagccgctactgaattataatttacaaacttcttaggcgaaaggacgttaattcgtggagaaagaaaattttttagagaagctaaaacgacttgtcgacctggcgaaaacaaaacagaacgcacttgacatcacagaaattaacaatttttttgccggggataatctgtcaacagaacagatggaacagatatacagttatctggagaacagtaatattgacattatccctgaagtaatcgatgagacaatactggcggaagatgacgctctgcttctggatgatgcagatgacgattttctgaaggaagaggaagagatcgatcttgatgcgattgaccttctggaaggaatcggcacggaagacccggtgcgcatgtacctgaaggagataggtacagttccgcttttaagcgctgatgaggaactgcgtcttgccaagaggaaggcggaaggcgatgacaatgcaaaggaacgtttaattgaggccaatctcaggcttgtagttagtattgcgaaacgttataccggcagaggcatgagctttctcgatttggtacaggaagggaacctgggcctgattaagggtgttgaaaaatttgattacacaaaaggatataagctgagtacatatgctacctggtggattcggcagtctgtcacaagagcgctggcagatcaggcaaggacgatccgtgttcctgtgcatatggttgagacaattaacaagatgtcgaagatgcagagaaagctgacgctggaactggggtatgaaccgtcggtagcagagctttccgaagcactcgagatgtcggaagacaaagtaatggagatcatgcagatagccagggaaccggcttcgcttgagacaccgattggagaggaagacgattccaacctgggtgactttgtagcggacagcaacgttgtgactccggaaggtaatgtggaatccgtgatgctgagagagcatatcgatgcattgttaggagatttgaaggaaagagaacgtcaggttatcgttctccggttcggtcttgaagacggacatccaagaacactggaagaagtggggaaagaatttaacgttacccgtgagcgtatcaggcagattgaagccaaagcactcagaaaactgagaaatccggtcagaagtaaacggattcgtgatttcctgtaatcagtaaagttgaatattattggcagcctgtgtgctgaaggccaattgtgtattacagttatgtactgcgcatggggcttttggcggcaggctgtttttttacggcggtccggctgtaatataaggaggaaaacgtatggaaaacaaaaagaactaccagctagagatggaaaaagtcatcgcacaggccaaacgggaaggagacgtccctaccctctttcttcatagctgctgtgctccctgcagcagctatgttcttgagtacctgtccgaatatttcaaaattacagttttttattataatcccaatatctatccccgagatgaatatgaggagagactgggagagattcggcgtctggtcagggagatgccgtcgggctatcctgtggaatttgtggcgggtgattacaggccggaggaattttttcagatggcgaagggacatgaggaagacgaagaggggggcgaacgctgtaccttatgctttagaatgcggctttatgaggcggcaaagctggccaaagaggggggatttgactggttcacgacaaccctcaccatcagtccgatgaaggatgctgcgaggctgaaccggattggcgaggaagcgggggaaaaatacggggtccgttttctcaattcagattttaagaaaaagaacggctacagacgctccgtagagctttcgcaggaatatcatctgtatcgtcagaattactgcggctgtgtctattccagacgggatgcagccagccgtgaaaatcaaagcggcggctgtcaaaacggcaatgggcagaatgactaaaaaaaatatgtttaaaatgcaggttttcagggtaaattatgcataatgatgaaattggaaaagaaatggaatttcatgaagatatctattgacgaaatgaaagatacgtattattatgatgtcagatggtgaaaatatatttcatatagaagaggaggaatgacgtatgatttacacggttacatttaatccggctctggattatgtggtgaaggtggataattttacgacaggaaccgttaacagaaccgtatcggaagaaattttttacggcggcaaggggataaacgtatctgctgttttaaaggaactggggtatgccagcacagcgctgggattcgtagcgggatttaccggagatgagatagagcgtggtgtcaggacacttggatttgcaagcgattttattcgtgtgaaagacgggatgtcccggatcaatgtcaagatgaagtcggacaatgagacggaaatcaatggcatcgggccgcaaatcacggagagtgatgtggaaaagctgtttgagaagctggagaagctggaaaacggagatattctcgtgctgtccggcagtatcccgaaatcgattgacgaccggatttatgaaacaattatgtcacgcctcgacggaaaagggataagaatcgtagtagacgctacgaaagatctgcttctcaatgttctgaaataccatccgtttctgattaaaccgaataaccatgaacttggtgaaatgttcggtgcagagctaaaatcagatgaagatatcataacctacgccggaaagctgcaggaaatgggggccgtcaacgtactcgtgtccatggcaggcgacggggcgattcttgtcacggaggagaaagaggttcataagatgggtgttgcaaagggaacggtaaagaattcggtcggagccggagattcgatggtggccggattcattgcaggatatctcgacaaacgggattacgcctatgctctgaagctgggaacggcatccggaagcgcaaccgcattttcggagggaatagcgacaagaaaagatattattgaacttcttgagaagctgtaaccatcaggaaaatagtatgtaaaggtaatagttcagacaggtctgcgcactcgctgcagtaacagttcatgctgtctgaattgttacaaataaaggctcatgagaagcagggagaaatcaggaggacatcatgaagattacagatctgttaaaaaaagaaagtattgctcttgacgtgaaggtcgattccaaaggagccgccattgactatcttgtggatttgatggataagagcggcaggctgaatgataaggaaggatataagaaaggtattctggccagagaagcccttggaagtacggctgtcggagacggaattgccattccccatgcaaaggttgccgcggtcaatgaacctggtctggcagccatggtggtgccggagggcgtggactttgaatcatttgacggaagccctgccaatcttctgttcatgatagcggccccggacggggaggctgatgcccacctggaggctctttcgaagctttccatggttttaatggatccggactttaagaacgcccttgttaaagcgaaaactgcagatgagtttttgaaacttatcaatgataaggaagcggatcgttttgcccctgcaaaggaagacggcgataagaagaacagctcaccggagaaaacggcggagatggatgccgaaggaaataatactgccgccaccggcagcaataatgcgggacaggcaaaataccggattcttgccgtaacggcatgtccgaccggaattgcccatacctttatggcggcggagaatctgtccaggacaggagagaagcttggatatcccgtcaaggtggagacgaacggcgcagacggagtacagaaccatctgacaaaagaggaaatcgaggcagcggacggtatcatcatagcggccgataagaatgttgaaatggcccgttttaacggtaagccggtcataatagcgcctgtttccgacggtattcacaaagcggaagaactgattaagaaaattgaggccggagaagcgcccatttaccatcatgcggcagacggcggagccggagagacggaatctgccgacaaggaaaatctgggtagaagcatttataagcatctgatgaatggtgtttcccatatgctgccgtttgtaatcggcggcggcatcctgatagccctggccttcctgtttgatgattattcactggatcccgccaattttggtaagaatacgccgctggcggcctatctgaagacagtgggagagcaggcgtttggcatgatgcttcccgttctgtcaggtttcattgccatgagtattgcagaccgtccgggactggcagtcggctttgtcggcgggctggtggctaagatgggaatgacttttgccaatccggcaggaggcgatgtgaatgccgggttcctgggagcactgctggcaggatttatcggcggataccttatcctgttgttgaagaaggtatttagcaggctgccgaaatcactggacggaattaaaccgattcttttatatccggttctcggcatttttctggtagctgtaatcacgacgattattaatccttttgtcggagccatcaacgacggcctgtccaatctgctgaacagcatgggcggaaccagcaaggtgattcttggcatggtggtcggcggcatgatgtccgtagatatgggcggccctgtcaacaaagcggcctatgtattcggaacggcgcagcttgcggaaggcaactttgacgttatggcggcagtaatggcaggaggtatggttcctccgctggctattgctctggcaaccacatttttcaaaaagaaattcacggtaaaagagcgtcagtcaggtcttgtaaactatattatgggtttgtccttcatctcggagggagctatcccgtttgctgcccaggatccgctgcgcgtgattccatcctgtattgcaggctcagccgtagcaggaggtctgtccatgctccttggctgtacgctcagggcgccgcacggaggtatctttgttcttccgacaatcgggaatccaatcgggtacctggcagctgtggcggccggatctgcagtggggtgtgtgattctcgcggctcttaaaaagaatgtttaattgatagttaagcaggtgaggacgccgccggtacggccggcggacggggtggtgggatgtgtatatgagtctttcgtcccggggaggattgtcgcggtatggggctgcgggcgaagataaagtctgcggagcacactcccgctctgtgaaatgcatcgcgctgctaagctcgagaggacctcgcaaatcagcggccggaacggaccatgtccggtgtgcgaaaacctccgcctgagtcttccgtccccggcgaaaatctgccccggggaagtaggcggaatcaattgcggaggggacatgggagtccgccggtgcttggcgaggtccctcacgagcttagcactgcctcgcactccaaagagtgcaaacggtccccgcagcaattcattccgggcggattcccccttcacgaccaacctcccacggggacggaagactcagccatccccctcaccacaccggacctggtccgttccggacgcgtcctcccaacctcagttaaatctctatttagcggtgaacagcagaaaaagataaggggccagcagggaaggcacggcataaaccacgctgacagctccttcatagaagaatcgcatcagcagggccgtgatcggtgtgaaaatctcgatgggaaggtacatatagtagttcagcaaaccgtagtgcccgctgtactgcattgcctgttccagcacaagggacaggagagagtagagggctaagacagaagcggcccggaaacagacgctgcgggtgtatattttgcgtaatctcaggccaatgatgataaaaaacatcgcggaaatgacgcactgggcgtagaatatcacatcccctaaatacactgcccacgctccggcggaatgcagggccagggagctaatcacttttatgagaagtcttgtaagaaccccggcggccagggtgtaaagcggaagtttcaacaattgtcggttcatgtaattttcctccctccataaaaagcagattagataaaactatcagttaccggcagatacaaataccatcctgttccagagcgaggattgcccattttcataaagagcggactgcatctgctgcataacggccctgtcctcctccgtgtaaaattcgatggcggtatccgtggggccgcaggagacataatacttgccattgctgctgcccagaagacgccagctgtcgtagagaccctgatttcttattttctccatctcttccctgctgtcaaaactaagaatccagaacatggcctgggtgacggagcccctgtttttgccgtccattaagagcggtttaataggatggaaatccacatagaggttcccgttgcggagggagtagcagaaattgtttttccagttttccggcagtgtgagcgtataatcgggagtcgttatgactgcgctgtcttttggcgcaattatccggaaaacgctgccgtcattattcaggagagcgccgtcggaattaatagtttggccatagccattctgtgtggcggcaagcatccagccgccggagttaaaatagtagttttcataaatcccgtccttgtttccgtccagccagagatcgcagtcctgtacatacgtaccgtcgtcttcctgccagcgccagttggatacgccgtcactgacagccggtcttcctgcatcctgtatccattgaccggcaaatacagggaaagtgaaaaacagcgtcatgacaattgcggatgaaataatttgtaaattctttttcatagatagcctccttagacagatagcctcctttaagagttaaagtcagggttcctctccatcagtatcaatacagaacggatgtcccgcagggtcgagtaaggtgcgggaggtcgtaaaaaactgctgagccgcttcaacagccccgcaggccagggcaaactcaacgccttcctccagattgtccacccagaaatccagatgaatcatctgcccctgtttacctttctcccagggccataccggaggttcatacccctcgatctcctgaaatgcaaatacggctccctccggcgatgtgacggcggcccatccgttcgcggcaggaagagtcagttcccaccccagaagcctgctgtagaattctgccataatctgtgcgtcaccacagtctattacagtgtttattctattaatcgccggtcgttttggtgtgttcatacttacctccttgaagaaattgatttggttgacttcattgtatcatgatggggatgagtgatctatagagattgaaaatcttaataattatgataccacgcagtgcagagcaatccggtatcaaagggggcaaaagaccttttgctcccaacatcataattatttaattgaagactctatcttctttgcagtcccggcttgcgacaaccttcccacgggacgaaagactcctcgatccacctccaccgcccgtccgccgtccgtccctgctgcgtccccacctgcttaactaaagtccccgttgcaactttcgcccatttagtatattattacatgggggaaatttacaccgaaaggaagagaaaaatgtaccgtttatgtatttttgatctcgatgggacattgctgaacacaattaatgccctgacttatacgactaatgttacgctgtcggcccttggcctgggacagattgtgccggagcagacgaaaaagatggtcggagacggctataagaaacagatggagcgcgcccttatggcctgcggcgatgaaaatctggttcattatgaagaagctctgacgctatatatggagaacttcgcgaaatactgtatgaaagatgtaaaaccttatgacggaattccccagcttcttgaatacctgaagaaaaaagggatgaagatagcagtatactccaataagccgcatcatcaggcggtggagaatattgagacaatatttggaaaagattattttgactgcgtcagaggcgagcaggcaggaacgcctaagaagccggctccggacggggcgctgatcgtatgccgtgaactggggatgcagcccggtgactgcctgtatctgggagatacaaacacggatatgaagacggggattgcggccggcatggatacggtgggggtaacctggggcttcagggacagagaagagctggtggcgctgtcaccccaatatatagtggattatccatcccaggtcgaattgattatagaaaaagctgacacagggaatgaggatttgcaatgactgtaaataccagatcacgcttaccgggcctttttgcccggcttttgctcctgcttgttttatctgccgctgtaatccagacggcgggctgcagccggtataatcccggcagcagtgacgtaagaaaggaccaagaggcattaacagcgtctgacggggaagacaggctcaacgtagtgacaacgctgtttccctattacgattttctgcgtcagattgcaggagacaggatagaactgaccatggtggttccggccggtatggacagccactccttcgaacccacgccggccgatatgattacgatacagaatgctgatattctggtatgtaacggcggcgcaatggaacagtggcttgataaagtgctggattcttttggaaacggcgccggtcccggacgggtcgtgacaatgatggattatgtggatacggtggaggaagagattgtcgaagggatggaagcggaggaacatgaccattcctcagaccgtcacagccatgagcatgatgacggacatgaagtcgagatagagtatgatgagcatatctggacttcccctgtgaacgctatgaagctgacggagattctggccggcgtgcttcaggaggaagacccggcccatgcggcggactaccgggcaggggctgatgcgtatgtagaaaaactggaggctcttgacagagagatacgggaagtagtagccggcggacacaggaggctgcttgtgtttggcgacaaatttccgctgcgttatttcttcgatgaatatgggctggaatacagggcggcatttacgggatgcagcacggatacggaacccagcgcaaagacgatagcatatctgattgacaaggtcagggaggattcgatcccggcagtttattatctggagctttccagccaccgcgtggctgagataatcggggaggagacaggagctgagcctttgctgttccactcctgccacaacgtgaccagaagacaatttgattcgggcataacgtacctggaactgatggagcagaatgtggtgaacctgagaaaaggacttgaatagatgggattattgttaaaatgtgagcatgttgattttggatatgagaatcaggatgcggtcattgatgtgagcctggaggtcagcacaggcgattatatctgtatcgtgggcgaaaatggttccggtaaaagcaccctgatgaaagggattctggggctgttaaaacctacggagggaaagattgaaatatcggaagagcttaagaaagccggtattggttatctgccgcagcagacggcggcgcagaaggattttcctgccaccgtatttgaggtggttatttccggctgccttggaaaaagaggaaaccgtccgttctactccccaaaagagaagcagacagctctttccaatctggagaggctggggatcgcggaccttaagaaaagctgcttccgggatctgtcgggagggcagaagcagagagcgttgattgccagagccctctgcgccaccgataaacttctgattctggacgaaccgattacagggctggatccttcggcgatacaggacttttataatattataagaaagctgaaccgggaagagcaggtggcgatcctgatggtatcccacgacatggcgaatatcgtcagacaggcgggaaagattctccatcttcagcagaaggcgcttttttggggaacggttcaggattatttaaaaagcggcataggaaaccagtttctgggaggtgaggaggaatgagcataatcagtgaaatgatgtcctacccatttattgtgagggcgctgataggcggtgtactcgtctctctctgtgcttccctgctgggagtcagccttgtgctgaaacgttattccatgataggggacgggctgtcccatgtatccttcggcgccctgtcggtggctctggcagcgggctggtcgcctcttaaaatttcaatcccggttgtggtgctggcggcctttttccttctcagaatcacggagagaggaaagataaaaagtgatgccgccattgcgatgatatcagccagcgcactggcaatcggtattattgtgacctccatgactacagggatgaccacggatgtgagcagctatatgtttggaagcattctggccatgagcaaagaggatgtgcggtttgccgccgttctttccgtcattgtcctcggcctgtttttattctgctacaataagatttttgccgtgaccttcgatgagaattttgcaagggccaccggtgtcaatgtttcgatttataatgttctgattgccgttttgactgcagtgacgatcgtgatcggaatgaggatgatgggagccatgctgatttccagtctcattatctttccgtccctgacggccatgcggatctttaaaagtttcaggggagtcgtaattgtatccggggtgctttctatcatctgtttcagtatcggaatggtgatatcctatatctattccactccggcgggagccagtgtggtagtcgtaaatctggcggcgttcctgatattcagcctggttcaggcggtgcgtcaggggttcagctggtagagataaaagccgcagggcggccggtatgagatactttcataccggccgtttctgtacgtcatttgtagcagtttggccgaaggctgaactgtaacgggataagacttgcggagcattcatttaattgacgcaggagggagagtgtctttataagcagtgtaaatatcacctggtggtgcagcgctgtcaggcgactggctgttggcgccctgatactgttccataaaagagataaaaagctgcactaccggattttccaggctcttatcgcggtaataaagccaggtctgcctcgttatgtactgattttgtgcatctatcaggggcagccggtaaaattcattcttccggttataaatgacaatatcagggagaattgtaaaaccaagacctctttttacatattcgacggcaatacttgagtcttccactgtaataaaactttggaggggtatatcaaagtggctgctccaccattgttccagctgggcaaaaagccggaggctgaaacgggaatgaatttcattcatatttttcaaatcttcaagatggaatggatccctggagataatataaatcttctcttcctttatcaaaagcttgtgatgcggccagctgtagttctcacggataaacccaaggggaagttctccgttacagagtttatagtaattgcgttcactgtaatcagtatgaatatcaaactggacgttcggataaagctcgtggaaacggctgaccagaaagggaagttcgcctcttgcaaagggagcgttggcggcaatacgcagagtccctgttacatcggaattggtaaaactgttaagcctgtcttttagttcctcatattcatttaaaatctgcgtcgctttttctacaaggagcagtcctttgggggtaaaggttatgcctctggaatggcgcacaaacagctccgtttcaaactcagattcaatctgctgaaggcgtttggtcagagtaggctgtgataaataaaggctctgcgaagctttggtaatattatgcgtctcgtgcaggactttcagaagacgccagtcgaaggtatccatacagttctccttttctatttttcaaattccacttagtgatattctttttttctatgggtattcataaaaattcacaatttgtaaatatcatatgcccctattatactgaaagcagataaaaaaattcaagtgttttcagtattgagaaaggagaaattatgtctgatgtctgaattttattacttaaatgaactgtcattggaaaacctgatgggatttacagaaaaaatatccgggtggcagcggttttccgggacagaggaagaactggaggcattccggtatatggagaagactctccgttcatttggataccgtaccgagcttgtcctgcatgatgcctatatcagccttccggtatcttcgcggctgattctgggagggaaggaggtgccttctcagacacattccatggttccctccaccggttctggaggagtggagggggaagttgtatatatttctcaggaaatgctggctggaatgaaggaacagtcgtgtgccggaaaaattgttgcttttgatggaagggccgtattcggcaaggtgaagtcggccaggttcctgggggcagtcgggatgctttgtatccaggaggaaccggtgagggagtgtattccttccggagcgtgggggtcccctgaccgtacaagccgggatttatatccgcaaattccgattgtatcagtgccggaaaaagagggaacgatgctgaggaagaaccgggaaaagcctctgcgcgccgtcattgagacatcggtggatacggggtggagaaaaataccatgcctgacggctcagcttgatgcgccggtggaaacagaagagttcgtaatgttttccgggcatctggattcgtggtattatggcgctatagacaacggaacggtgaatgcagcgcagcttgagattgccaggatcgcggcaaaaaaccgtgagtatctgcggcataatttcagaattgtaaatttctccgggcattcccacggcagatatgccggttcggcctggtatgcagatgagcattggatggaactgcatgaacattgtatcataaatatcaatgccgacagtatcggcggtaaaaatgcatccgatataacaaagtcgatggttatgccggagacggcagggctggcaaaagaaattatttacaagctgacaggtgttgaatttatcggaatgcgctgtaagagggcggcggatcaatccttttggaattgtggggtgagcagcgcatttgcctcattttccaggcagccaaaggtcagacaggaggacggaagcttttcatcaggaaaggggaatgcggagctgggctggtggtggcatacaccggaggatacgatggcaaacgtggatccggaaaattttaaaagagatgcatccgttttctgtacatatataatggaatttctgaccagggaggcaattcccctggattttgcgaagacggcggaagagatctccgtaacacttaaatcgtgggccaaaagagcagagggaagatttgatttatctcatgaaatcaagatgtcagaagaacttcttcataaattaaaaacggttccgtcggatgataaatcggagaataccctgaaaatggcactcgggcgcattcttgtcccactgttgtatacgaccggggatatttataaaaatgatgaagcaggggaataccctctcttgccatccctgatgcttttggaggaactggctcagacggagccggggagcgaagaggcgatgaaactgggaattgaaatcacaagaaagagaaattttattgcggacagcctgaacagggcattgaagctttttgcggggaggtaaataatgaacgataaacgggaagtaaagacgaacttttttgataaagtcatcaggggaatcgaggtgatgggcaataagctgccgaacccgttcctgctttttatgatggcatggggcgttattctgatcttatcccagattttgtccggaatcagtgcagtagatccggcaaccggagaaaaggttatgattgtggggatgctgaatccggaggggctgacctgggttcttaaaaatatggtcggaaattatataaagttctctccgatgggaactgtactcgttatgatgattggtcttggtgtggcgacgagcagcggacttctgaatgaagcgatgaaaaaactggcaaaagtgccggagcagtggcttgtttttctcgtcgtatttgtggggatctgcggcaacattgcctccggagcggcatcggcgattgtaccggcattggcggcaagcctcttttttgctgcaaagaaggatccgatcttcggactctgcattggttttgccggagtaacagccggttacacggccaatattatcctgacgggcacggatgttctgctgtcaggcgtatctacaaccgcgtaccagctggtaaaaccggatggtgttgtggagccgacgtgcaactactattttatgattgcatcgactgtcattatttcggctgtggcctcttttgtaattaaccggtttatgatgaaaaagtatggtcagtgggatgaaaaatacgagcattgccaggcggctctggaagctgcagaggaaacacatggggaggagcaggcggcagtgggcagaggcctcaggaatgccctgatagcaaccgtgctttactgggctgcgctctttttgacgataccggggcttgtggtatcgggaatcgttcctctgatgatgttctattttattctggtaggtctggcctacggaatcacggtaaagagcattaccaatgcaaatgacatggtgaagggcatggaaaatggcgttaaaagctgtcttggttttcttgtaattgcatttcccatatcaaatgcgatagaagcattcggctattcaaaaattgccagcgtacttgcgattactctcgctgagttttgttccagcaaaaatattgaaggacttccgctttttgtcattatcatcctgattacaagcctggttaacctgcttcttgtcagcagtaccagcaagtgggcattacttgcgccgattttcataccgtttatgtattatcttggctattctccggaaggcgctcaggtattgtaccggattggagattcctgtacgaatattattacgccgctgcagccttttatcccgctacatttgtctgtaatccgtaaatatgacgcacaggccggaatgggctccattttctcaaggacgcttccgctatctattacattttttatcacttgggtctgtatcctggctgtctggtattattttggcctgcctctcgggccgggcggcatcggcttcagattataataaattacaaataactttgttacgttgttattgaccgtaattctcaccagcttgactttattccatatttgtgtaaaaatagtaaattaggttaaaactactgttaaacagaaaagaaggttgataataatgacaaagattgatattatttccggtttccttggagcgggaaagacgacatttattaaacagctcctgaaggaagccatctcaggcgaaaaagtagtgctgattgaaaatgaatttggagagattggaattgacggaggctttttaagggatgcggggatcgagatccgtgagatgaattctggctgtatctgctgctccctagtcggggatttcggaaaatccctggaggaagtcctgacgaagtatcatccggatcgtgtaattattgaaccgtccggcgtcggcaagctttcagatgtcatgaaagcggtgagagatgtggcttccgagatcgaagtcatgctgaacagtgcggttactgttgtggatgtgaacaaatgccgtatgtatatgaagaatttcggcgagtttttcaataatcagattgagaatgccggcaccatcatcctgagccggaccgatattgccggcgccgacaaggtgaaggcggcggttgcgatgctccgggagcataacgcggacgccaatattgtgacgactccgtgcggccagcttacaggcgcacagcttcttgagatcattgaaaagaaggacgatatggcggaggaattgatgcgtgaggccagagagcataaacacgcccgttcccatcaccacgatcaggagcatggagaagattgcggctgccatgatcacgggcatcaccatgagcatcatcatgaaggcggacatgacggtgagtgtaactgcggctgccatgaacatgagcatgctcatcaccacggccatgaccacggcgaggagtgcggctgccaggcgcatgaccacgatcacgcgcatgaccacgaccatcaccatcacgaccatgatgaaagctgtacctgcggctgtcacgatcatgaccatcatcacgctcatgatcacggccatcatcatgccgatgaagtatttacaagctggggcagagagaacgtatccgccatcagccgcgataaactggaggcggtgctgaaggagctggcatatggacagaaatacggtcaagttctccgtgccaaaggtatgatcccgggtgaaaaagaaggcgtatggattcattttgatttggttccggagcagattgaaatccgtgaaggttcccctgactatacgggcaagctctgtgtcattggggctaacctggatgaagaaggactggcggaggcatttaacgcctgattgacagagtataaggcacagccggaagcgggcagactgtgcaaaaaaggagaaataagtaatggaagacgatagaatgccgttatttctgataaacggttttttggaggcaggcaaaactgcttttatcaaattcacgcttcagcaggattactttcagtcggaaggaaagactttactgatcgtttgtgaagagggcgaagaagagtacgaagaggagttcctcagggagacgaaaacagccgccgtgtatattgatgagatttcaaagctcacgccggaatacctggaggagctggagcttctttataatccggagcgtgtgctgatggagtggaacggcatgtggaacccggaggggctgaagctcccggccgactgggatctttaccagcagattaccattgtggacggttccagctttgatttgtatctcaacaacatgaaaccgctggtgggcagcatggtacgtaatacggagatgctgatcatgaaccgctgcgacggaatcgaagatctggatacctaccgcagaacactgaaggggatgaatcctcaggtacagatagtattcgaagattcggaaggcgagatcagtgaaatctccgaggcggatcttccatacgatgtaaatgccgatataattgaggtgtctccggaggcatacggcatctggtatatagacatgcttgataaaccggagcggtaccgtggaaagacggttgaatttacggcaatggtattaaagacaccggatttcccgaaaaactatttcgtaccgggcagaatggcaatgacatgttgtgaagccgatatgacattcttgggtttcatgtgcaaagccagaaatgcaaggctcttagagacaaaagagtgggtcaaggtgagagcgcgcgttgagtatgaatacagtccggaatatgaaggcgagggaccgatgctctatgcagaatatgtggagaaggcggaaccgattaaagagattgttcagttttaggctgcactgcacaggcactgttttgagcaagacaaacaataattaagattgaaaagagcaggcaatcttcctgctcttttttctgccaccgtaaagtctggcgccatgagaagccggtttatcagccggatgcttactgccgctgcattttcgcacggtccgcacagcaagagcgcagtcctgtctgaactgttacgttcccctcgcctatctggaacattttaaatccctcaccatggacttcgtttgattcaagaacgacagtgaatgcggccggatccacctcttttacaacctgctggacaaaaaacatttctttattattgcaggcgcagatcacaacttcttttttatccattttatatcctcccattccctttaaaattgtgctgcccctgttgcagcaggcgtcaattgctttcgtcacctgctcgcctttgtccgtcacaatcatggccatctttccggcattaatgccatataccgctttgtcaacaacgacggcaaacaggaaattgataatcatgccgtatacgattccgtccatatcacggaacaggatgcctccgatcaggataattcccacgtccgacaaaaaagcgattttaccgagggataagtaaggctttaaggcttttaccgccattatgataaagtcggtgcctccggtggaggaattctgcatatagataatggcatagcccagcccggccagcacgcctgtgcagattgccgccagcatcctgcttccggtgtataccgggaacagggggcaagatagtcgatcataattgatgagatgaccatacagcgcacggaacgcagaaagaactgtttgcccaggagtttgtagcacagcgccgctaccggaacattcaggacaatgattgtgaggccgacgggcagtgcaaacagccggttgaaaatcagggctattcctgaaaaaccggtcatcggaaatgcggaagccgctgcaaagttgtaaatacctaccgcaatcaaaatactgcctaaaagttccactccgattattttcaaactgcttataagttttgttttcatcgttccagcctctctttcttttaaactacttttaaacgcacaaaaaagagccgttacggaaaataatatataatccgcaaaagctcttttatgattttattatataggaaccgccgctccctgtcaatgggatttcgcggctgtcaaaattcacaactccgaatggttcctgttcatacccaatgaactattccgacattttggggaccggtgtcggccgtctcctgtcaaagacctcagacacgtcgaataaatcgcttaaatggtctttggtgggattggtttccggcaagtcgtaatacatacggaaaccgtccagattccgccgtccctgtctcatataatcgtcgccgatctgtacccagtactggctggaatccacattgcagaaatagcggaaacctttcgagtgcaggtactggtagcgttcgctgctggtatcatagggcttccagccgccgatatcgctgccgaaggggaacaaaataatatcgcacggcccggtcagcgtctctacttcggcctcccacttgtctgtgtcggcccggaaatgttccatggatatggttcccatattgcggtggccccagctgtgtgaagccagttcaaagccgttttccttcaggcattccgccaccttggcggcttcctcccgctctttctcataatcaaaaccgggatgctttgctttgtactcgtccgtattataggaagctgcggtacgatagccgaggatgccgttatatccggtaaaggcaatcacggctttggcgcctttataagagaaatcagggtgttcgtcgatgaaatcctgaagcagggggaccaggtcataggaaccgaccagtacggagccgtcatccagcttcatctcatttgtcggccttccgtcctccccgataatcatcttggtggcaaaaccgtctttttccatatattcataataacagacatcgtcctgcgacatgacaaagggctgtttgcccggaggcagcataatgttgccttccacaaagtgcggattgccgtcctcccctgttgtctcgtaagctacgtcgtgaagccggacaagtacaaacccctgtcgtacatggactgaagaattttcataaattcatccttggtagtcatcacctggttatagcccttctccctggagtctccgtcaaacgccttggaggtgtctataatcagggagtggaagaagacatgagtcaccttcttcgggtcggcccgcacgagagcggttttattctcttcatatccggcaatagccgctgtgacctgttcgtccgaagcatagggactttcgctcaacatggcgatagcgccgtcatagtcgtatcctgcggccagaagacctgcccgtgacaggtaactttccaggctttcgctgtccgcgtccgcagaagaagactcctcagaggatgattccccggcaatccccggattatcagagtccgccggtccggaaggattggcgccggtcaaaacctcggcgatagaagcgcccctggcctccagacttttattcctcatatagaggtatcctgctatgcataagagaatggccagaatcgatccgagtataatgtagggcagtatcctgaggaacctccttttacgtcgtctggaatagctggagtacccgctgtttttcaatgaaaattgatcttttcccatagtattgcatcacctttatctaaaattatgaattaatatgttaatgaaactatctgtaagataattggacaaaaaagtaggccgtaaaaagcccggcatattattataacatagaatcaaaccgatgactattacagtttacttaaattttactggtaaatgccggattgatatggttcacatccccgcagctataaaattttgtcggaaagaaaagaacgtttcatggaacgcggagtcataagtacatgcattctgtccatatcctgattaaagaaggaaatagatgcggagaaaaggtatgaaacgattaacggcggttattttgacgattatgatggtcctgcagacagggctttacagtgtgtatgcttctgtcccggagattccggccgaggcagcttcagcgatggtacaggcggcggacgggccggaaatccaggcgcccgacgcgatcctgatagaagcttccacaggaacggtaatttatgaaaaaaatgcggatgaggccaggaacccggccagcgttacgaaaatcatgacgctgctcctgatttttgatgccctgaaatcagggaagatacacctggatgacgaagtcgtaaccagcgcccatgcaaaatccatgggaggttcccaggtttttctggaggagggcgagattcagacagtggagacgctcattaaatgtattgtcatcgcgtcgggaaatgatgcaagcgtagcgatggctgaatacatagggggagacgaggccacattcgttaagatgatgaacgagagggccaaaggcctgggaatggagaacgccaattttgaagactgctgcggactgacggattccacgacccatgccatgtcggcccgggatatcgcccttatgacaaaggagcttatcacaaaatatcccgagatattcaattattcgaccatctggatggaaaacatcacccacgtgacgaagcaggggacaaaagaattcggactctccaatacgaataagctgctgaagatggcgactaattttgaagtgacgggacttaagacaggttccacgtccctggcaaaatactgtctgtccgcaacggccagaaaagacggagtggagctgattgccgttattttagctgccccggatttcaaagccaggtttggggatgccctgaccctgcttaactatggatatgccaattgcaggatgtaccgtgatgaagacccggggtccgtgcctccggccgtgattataaacggaattcaggatacggtaccggcaaagctcaacggaattttttcctatctgacgatgaaaggggaagacttcggaggaatcgagaaggagtgggtatttgaagatgaaattaaagcgcccgtaaatgaaggggatatcctcggctatctcgtataccgtttgaacgggcaggagattggcagagtggaaatcgtagccgccgagagcatcagaaaagcgaatttcctggattatctgaaacgggccgcatccagcttctgcgtgtgagatgcagtactgaaatcagcagtaacggctgatgttgtctgaactaatataaatggtcactgtcagacggagttttggcactattacatagtgacaaatccttatttcttaatgttgaaatatttccctcaggccgggtataataaaactatcaaaagaaatgaccggccggtcacttttataaaactggaaacgtaataagaacggaaaatagagtaaaagtggaaagagggtaaatgtatgaaagaaaaagttcaattattcggacggtttttaagcggaatggttatgccgaatatcggtgcatttattgcatgggggctgattaccgcgttattcatcccgacgggctggtggcccaatgaaagtcttgcggcactcgtatcgccgatgtcaaccgtgcttctgccgctgctgattgcctatacgggcggcgctgccattcacggccagagaggcggtgtaatcggcgctattgcaacaatgggcgtaatcgtaggttccgatatcccgatgtttatcggcgcgatgatcgtaggtccgctggcggcctgggttatgaagaaattcgaccggctgttggaagggaagattcctgcaggctttgagatgcttgtcaataatttttcactcggcattctcggcgctgttctgacactgctcacactgaagggagtcacaccacttgttgagtcattaaacgaggcgatgagggcaggcgttggtttcttcgtggacaataaactgcttccgatggcaagtatttttattgaaccggcaaaggttctgtttttaaacaatgcgattaaccatggaattttctcaccgatgggaatccagcaggtggaagagaccggaaaatcaattttcttcctgcttgaagccaatcccggaccgggactcggcgtactgctggcatactgccttgcgggaaaaggatcggctaaaagctcagcgccgggcgctgtcatcatccatttcctcggcggtatccatgaaatttattttccatatatcctgatgaacccgctcctgcttctctcagtcattgcaggcggagccagcggtatcttcgtagagcagatgtttggcgcaggcctttcggcgccggcttcaccgggaagtattattgcaatcctgggcatgacgccgagaggaggttatcttccggttatactcggggttctggtagccacggcggtatccttcttcatttccatgccgattctcaaattcgccgcaaaggatgaagatctcgaaagctcaaagaacagaatgaaagagatgaagaatgcggcaaagggcatcgctgatgagaagaaagcagtggcagttgatacgaaggacatcaggaaaatcgtatttgcatgcgacgccggaatgggctccagcgcaatgggagccactgtccttaagaaaaaactgacggctgcgggacttggcggtattgaggttatgcattcccccgtatcatccatcccatccgacgcgcagattgtggtgacgcatcaggagctgggagagagggcaggccacagcaacccgaatgcgcggctggttctgattaccaatttcctggcagcgccggaatatgatgaactgattaaagaattatcaggcagataaggccggcggggcataaagattcttgtaatccggatacggatagaatatagttaagacagaaacagggcatgccatccatgccccggttctgtctttctatcgattggcggcataaatcctcacggtgtggggccgccggacaagatgaggcagagagcgtgggagagggaacggtattgatatggattttacaccgagaatgcagcagatacttttaattatgctgaatgaggacaaggtcatatctgtcaaaaacctggcggaacggatgaatctgagcaaacgcacggttcagagggaactggaatatctgggcagggccctgaaggaatatcatgtggagttctgttccaaaaccgggacaggcgtatggctggaaggggcccgggaggaccgggacaggcttttgcgccatctcagtgaaaaagataccctggatgcttccgaccgtccggaacggcgtaagaggctgatactggagatattgaaggacaaaacattgaaaaagctgtattattacagcgagctttttggcgtaagcgaggctacaatcagcgcggatctggaggcggcagaggaatggttcgagccttttaacctgaaaatcatcaggaaaccgggctacggaatttccatagagggcagggaaaaagatttccgtcttgccctcagggcttttatcgatgagaatatagatacgcattttatcagggatatctatgaagaaaaggatcaggctctgtttgaactggtgggcagtaaaaatgacaaaaatatctataagattttaaataacgatcttctgcttagggtgattgcctgtatacagaggatcaaggaccggagactattaaacctgacggaaaattcgtatgtcggactggtactccatgtgacgattgccgtcaacaggattttaaagaaggaaatactggaagagaaccaggccatggtggaatcgctcagggggaatgatgatttttgcctcgcgggcaggattgtggaagagctgtgcaaagagtttgagatagagattccggagattgagacggcctatatctgtcttcatattaagggggcaaaggttcagcagattgagctggatgaggattccagggcaagagtcagcggccagagggaactgcttgaggtggtaaaccagatgctcgaccgctttgatccggttgttgcatggcagttaaagcaggatgaggaatttgtggtacacggcctggcggcccatctgcagcctacactggtacgcctggccaacaatatgaagatagaaaatccgctgctggatcagataaaacgtgattatgcggcaatatttgaacggtgccgcagcgttgcagaggtgattgaagaacattacggttatccggtgccggagccggagataggatatctggcgatccatttcggagcggccatggtgcgtcttgagagcagcagggaagtcaaaagaaaagtcaacatgggggtggtctgtgcgagcggaatcggtatttcccgcctgatgtgctccagaatcaaccgttttttcaatgaccggatcaacctgacggcgtatggattgaatgatttatcgccctatgtgctggaacggaccgatttcttcgtttccacgctgcagcttaaggaggcggctgacatactctatgtgagtcctctgctgactgcccgggagatggagcagatagcagccaaggtgcgggaatatgaacatatgcctgcagtcaggcaggaagacgaaacgttcacaaggcagcttgaggaagtcaattacatggcggctcagatcaagtcgctgattcaacgctttcagcttgtcaggacggatgagacagtcacatttgaggaatttctggtacgggtgggagagggacagacaccctacgccgaccggcagaaaatgataatagatgccttaaaaagaagagaaaccatgggctcccagttctttccggacttttccttcgctcttctccatgcaaggacagccggcgtagcgcggcccgtctttactgtttttaaaccggagacaggaaaacagttcctttctcctgatatgaaagggatcagggctgctattatcatgctcatgccggaagaagagcatgtgaatgaaaatgcctccatgttaggttatctgagtcagaagctggtggaggaggatgaatttttaaacaccattatgacgggagaagaagaggatatcagggggctgctgtcgcgctatctgaaaaaatattttaaccggtatctggataaaatataacgttattgttcacactccgccaaaaagcggcgtgctgtgaataataacacgtttcgcgatgcacagaaacggcaaaaaacgccgttgattgtggtgaaaagttcacttttcgtcgcgtcgcgccgttcaacccgggattttcgtgcaaacttcagcttttgtcaccatccaatgacgccaaatgcaattttgtttctgttgaattgtatccggcagtcaggatataatgaattcagagagcctggagcggttcggccggaatggccggcgcgggccatcagataaagcactgtgtgatatcgaggaggaaagagaatgtttggttttggaaagaaaaaagaacagaccgaaaaaattcagaaaccggagcttttagaaaagaagaacatcaggctggactgcagtccgatggcgaaagacgatgtaatccgcgcagtcggacagcttctctgcgacagcggatatgtggatgaaggttatatagaagcgatgattaaaagggaattgtcgttccctaccaatataggaaacggaattgctctcccccatggagtggaagaggccaagaaagagattaagcactccggcattgcggtgatggtattcccggagggaaccgactggggaaccgagaaggttaacctggtcatcggtatcgcaggggtgggagaagaccatcttgagattttagcaacaatagcggaaaagatggcaacgcctgaagcagtggaagaactgattaagggcagcgccgatgatatttacgcagcatttacaacgaaagcctgagaaagagcgcaggcgggttaagcagcatattttagctaatgaaaacggaggttggaaataatgaaaacaagagcggtaagaatgtatggacttgatgacttaagattagaggaatttgaattaccggagataaaggatgatgagattcttgtaaaggtaatgagcgacagcatctgtatgtcgacctacaaactggttaagcaggggaaaaagcataagcgcgcgccccagaacatcgataccaacccgattatcgtcggacacgaatttgccggtgacatcgtgcaggtgggaaaaaagtggcaggatcagtttaaaccgggacagaaattttcgatccagccggctatcaattaccagggcaagctggactcgccgggatattcttatgagttctgcggcggagccgccacatactgcatcattcctcatgaggtaatggagatgggctgtcttttaagctatgacggcgaaagctatttccaggcatctctcggcgaaccgatgagctgtattatcggcgggtaccatgccaattaccatacgaacaagaaaaattacgagcatgccatgggaaccaaaacggacggcaatatcctgattatgggaggctgcggaccgatgggactcggagcggtaagctatggcatccagtttgaaaataaaccgaagcgaattgtagtgaccgatgtaaatgaagacagaattaaccgtgcaagggaagtgatttccgaggagcatgccaaagaaatgggcgtggagctgcactatgtaaatactgccgggatggcggatccgattgcggagctgctggccattacacaggatcacggatacgacgacgtatttgtctatgccccaatcaggcaggttgcggagatgggagataagctgctggcatttgacggctgcatgaacttctttgcagggccgaccgacagccagtttaaggcggaaatcaacctctataactgtcactacacaagcacgcatatcatgggaacaacagggggaaatacggatgacctgatcgaggccaatgagctttcggccaggggagcaatcgaaccggctgttatggtaactcatgtgggcggaatcgacagcattgcagaggcgacgaagaatctgccgtctattccgggaggcaaaaaactgacctatacccagttcgatatgcctttgaccgctatcgatgattttgcgaagctgggagagagggatccgctgtttaagaagctggaagagtgctgtaaagcgcataaaggactctggtgtgcagaggctgagaaggtactgtttgagcatttcggagtaaagtaataaaaagcgcgttttgtgaaggacagagttcattagagaaggacagagctcaggggaggctgtgaccggtaccggtcacagcctcccctgtttttgaagctgtctgtttcacggcagccctgcacggcgcaggttttgccgggtggtttttcattaaaggcggtgacctgtgcgcggagcgtgcaggttattgttatttctcctgtgtcacagggccgtagaagccgataagatataaaccgcagattcctaccagagcatagataactttggacagcatggaagcggaaccaaagagataggaaacgaggttaaagttaaagaacccgataagcccccagttgatcgcaccgataatagctatggtgagagcgattacatttatagttttctgcatattctaccatcctttcctgtatacggatttttccgttttgcttagtattctcccgaacaagaaaaaatatacggacgccggaaaattatcaggacaggaatgattccgacatctggaatatattggaataattatggaaaagggagattcagcttgctggatattgttatttattgtaagatagagggaggaagaaattgacaaatccggaaggaatatcgagattatgaaaaattataaggtgggaaaaaaactggctatttcctatattactattatgtttctgctgattttgggctctattgtaaacatcaggaacttaatagaagttggggaaagagtggagagcttttatgacgggccgtttaatgtaaggggctctgttaattccgtcagcgttaatttcgaatcactccagaaatcgatgctgcgggccattgcaaatgaggacagccagattatcggggactccgttttagcggcggatgaatcgaaagtgaatatccaggcggagcttccggttatttctgaacattttctgggcgatcagcagattgtggaggagctggatacccttttttcggaggtgttccccatgaaccaacatgtgctggagctggcctcaaagaatcaggaccaggaagctctggactatatggaagcttacatccgtccagtcaataccaatataagaaagaatataaatttaataatcacctcctcaaacaataaggggattgaactgattaatgcggtgcgccaggccaggacaaattcgattgtctcgctggcggtgctgacggtgctgagcatcggcatcagcgtcggttttgccctgtatatcacaagaagcatcacccgtcccatatccgagctggagcaggcggccgaatggctggcgtcaggaaagatgcatgacgtgtcaattacatataactccggcgatgagctgggaggccttgccgacagtatgcggattacgattgcacgtatcaccttcgtaattaatgatttgacgtatcttttgaagcagatatcggaaagcaattttgccatagacacccgcaatgagagcgaatacgtaggagagttccggccgctgctggattcaatccggcagatgacaacagatttaagtgatacgataaagcagatcaacagttcggcggatcaggtagcaggaggttcggagcaggtctcttacggagcgcaggagctggcggcaggttcatcagagcaggcgttgacggtggagacacttgctgatacaatcagccggcttgcggaaaaaataggcagcaatgcctatgatgcctctaatgcaaataaaaaagcaggtgtggtgggccatgagatggaggagagcaatgaaagaatgaaaaagatgctttccgccatggacgatatcagcagcagttcggaacagataaagaagattatcgatacaatagaagagattgccttccagactaatattcttgcgctgaatgccaaggtggaggcagcccgggcgggagtcagcggaaaaggctttgccgtgattgcggacgaagtacagcagctttccgcaaagagtaaagaagccaccaggagcacgtcggctctgatcagcgaatctctgagtgcagttgagaacgggcttatgatagcgaatgagacggcggactccctgcagaatgtggtgatcggtgtaaaagaaattgtagcggcagtggagaatatatctgcagcatcgtcggaacagtctgagtcggtagagcagctcacacaaaatatcagccagattgcaggcgtagtacagaataattccgccacagcggaggaaagcgctgccgccagtgaggaactgtccgggcaagcggagacgcttaagaacctgatcagtgcattccgattaaaataattaagaaacaaggaaaaggaggggctttatggaagaaacatttttgtgttttgaaatcgaagccgctctttttttgattcccctggagctggtgaagcatatcattccgggcaataacggagaagggcctgtttattacaatgggagtgaggtcagactcaccggcttctgccgcttctctgacagggaacgggccgcttgcggcagatatattgtcctgctgaacggaacggaggaagaccagggcttttcggccgatgaggtcagggggatttatacggtttctcagggccggcagaaggacatccccggagaagccataggtacggataattcctgtctgttaaaagccgcctatgtggaggaactggcttcctgggcgtttatcgtaaaaccagacatatttttacggcagagaggtattgaataatggcagtggagagaaaagacagtctggatgcattgaccagagcatggtccgcacaagcggcggaggatataatcggccgttatctgctcggaaggacccggtggggaggcgatgctcttcttttgatcgaatttaccggggtaaatgagagcggaattgcagatggagaacagagggcagaggatggcgtactgaaaagaatgtccttctttttacaggacacgctgaagaggacggatacggtggcaaggattggcgacgcctgttttcttgtgtttttgctgggatgccgaagtaaagacgtgttatataatttaattgacactgttaaaaaagaagcactccgtgacggcgggttttcatttgctgccggcggagcagtgtccaatggtgagggacagacctatgaaagcctgttgaatgaggccaaagcaggtctgtttcgtgcgaaaaaagaaaaaagctgcttttatctgatgaagccgggagacggggggagtgaagaagagagcggctgggcctttgggccgataagggaatacgagccggacagcagaatggcggacatggaatttgtccgtgaaatgatggatttgtctgagtgttgtatggattgtgaagcgtcggtgaaccgcggacttgaaaaaatatgccgttattttggggccggagagagctatattgtagaacgaaaatcgggagggaagggatttgaagtcacgtttgactggcgttcctttacaccctgcgtaaataataacaacctcagagtaattccgagtctggtgggagagcggtatctggagctgttcggacatcagaaagtccttgtatgcaacagaatacaggagctggaacggctgaatcctatcagcgccgagcgccagaagctgagaaacagcaaggctctgcttcagtgtccgattatggagtcaggcgttgtggttggctatatcagcataaacgacagcataaaggagagaatctggtcgcagcgtgagataatgacgttttatctggccgggagagtcatagcgtcgcagattatgcagctgcgtttccagcgctttacaaaaatcatgatggattatgaccgtttgaccgaggcatggaattacagccgttttctggacgaggggagcagaaggctgcaaagcagctcactgctgcaggctgtggtgacaatggatattaaaaatttcagagtgattaatgccggttacggtttcgagacaggcaatacgattttgattcatatcagtcttttgctgaacagctttaccggaggaaatgagtgctttgcgaggattgaagccgacaaattcattctgcttctggaatatcagacaatgaacggtctgctgcacaggctggagcagttgatacggcgtgtcgagcagataacggcagatgaaaaactggactttaatttaagctgtgtcatgggaatctgcctggtggaaccgggagacaaggatatgtctgttctcgcggatcacgccaacatggcaaggaaggcacagaaagattatcataaaagcgcctataacttttataacaaagaggcggaactggaatatgccaaggagcgcaaaatgagcctgaggatgaagggggcgctggaacgtaaagaatttcttgtttattaccagcctaaaatcagtctctctcagcataaaattatcggtctggaggctctggtccgatggaagacggaggaaggtgaaattatacctcccaacgattttattcctctttttgaaaaaaacggatttattacggagctggacctctatgtcctggaacgtgtctgtgagcagataagaagctggatagatgaggggaaggaaccatttccaatagcggtcaacatatccaggctccacatcatcaaggataatttcatggatgggcttacaacgcttactgaaaaacacggcattcccgaaaagtatcttgagcttgaaattaccgaaagtgcatttctgcatgagccgaagcgcattctggggatggccaggaaaattaaggagcagggctttatattgacaatggatgactttggcaccggttattcttctctcagcctgttaaaggatcttccggttgatattataaaattggatatggagtttttcagaaaagatctgagcagtcgggagaaagttattatttccaatgtaatccatatggcgaagcagcttgatatccaggtaatatcggaaggcattgagacaatggaacacgaattgttcttaaaagaaatcggctgcgatttggcgcagggataccggtacggccggccggctcccatcgaagactatttaccgcagatgtatggaaattatgagggatgttagggaaaatggcagaggaaacgaaaaacggatatttggaattatattgcggagacggatatgcacgggtgccgatggagcaggttggaatgattctgtcgaggccggagattattgccgtgccgggagcgccggaggatgtagccggtatggtttatttccataacagactgatcgccgtccggtatccgcagggggcacagcggaaatcttcctacgggtgtgcggtgttgatttgcagggaagacggaggcctttacgggctgctggcagacagtctgtccggaggtgatcggcttgatacggtttacgaatagggagtttgagcttctgaaacagtatatgggaaagcagtatgggattgatctttctaagaaacggacgatagccgagtgccggatgagtccggaactggagaaacatgggatatcctctctgaaacagtatatggaactgatggaggcggacaggagcggcaggctgagaacgattctgctaaaccggcttacgacgaattacacctacttttttagggagccaaagcattttgaatttctggagaagaaaatccttcccgaagtaaagccggaaccgggccgctttgtatacagaatctggtcggcaggctgttccagcggggaggagtgctatacgctggcaatgcttttacaggattataccgaccggggcggctggctcccggattttgaaatcctgggaaccgatctctcggagaaggcggtaagaaaagcgagggaaggcagctatccggtcaaagaactggaaaatatcccggcccgctggcagaaaaaatactgtaaaaaagacggtaatggggaaaactttgccattcatgccgcactccgggagaaagtcaggttccagacgatgaacctgatgaagcccaatgcggggattggcagatacgatttgattctgtgccgcaatgttatgatttattttgatgaggaatcccgtaaaaagctggttgaaaatttataccgggcactgaagccggaggggtatctatttgtagggcatacggagctgcttccgcgaaaccatgagctgtttgaatatgtgtgcccggctgtttacagaaaataaaggatagcgattatgaaaaaaataagagtcgcggttgacgcggagaatctccgccttaaggaggctgtcctggaagcgctgaaatgggacggcataacggctaagacggtcggcccggggactttaaacagcggaaaacaacatttaagagaatatgatgcgctaatattggcctgtgagacggaactgttttttgtgcgcgaatattcctctgtgcctgcttctgcaaaacagtcggtgcagataatcggcgtctggggagaaaaaacgctgggaagcgctgcggtaaacagcggctgcgagtttgtccggatgatgtccatggatacggacagcggaaaaaaattattttccagagaactgattataagaataaaggtcggcagaaccggaaaaagaatatatactgcagagccggtgccgtcctgtaacagccgctttttagtggggatcggctgttcggccggcggcccgaaggctgttttgcagatattgaaggctcttccggcggatacctgcggaatattgcttgtacagcatctgagcagaggcttttcaggtctgtttgcccaatatctggcccttcatacggggctggacgtaaaagaagccagaaccggagaagcggtgcgggacgggacggtttatctggcttctgacggctgccagatgagcgtttccaaaagcggagccgggtatattctgaaaaatgagccgggggaaaaagtgaatggatttgcgccttctgttgattaccttttctcttccattgcccgggcggcggcagaaaatgcgatggggattattctcaccgggatggggtcagacggtgcaagaggcctgtccgatatgaaaaaagcgggcgccttcactgtggtgcagaacagagagaccagtgagatatataatatgccgtccgcagccctgcttctgggcggcgcggacaaacagcttccgattggggccatggcagatgagataaacgggttttgtatacggatgagaaataaaatcaggaggtagaattagatgaaacctgcaataatgatagtggatgatgcggcatttatgagaaggctgattaagaaggcgcttatcaatgggggctatgacaagattatagaggcggaaaatggaaaagcggcgctggagctttataaatcggaaagaccggagctggtttttctggacattacaatgccggaacgctcaggacttgaggtgctggacgacattctgacggaggatccggaagccagggtgctgatgtgctctgcgataggccaggagtccgttattgcccgggcgatccagcggggggccagggatttcatagtgaaaccattcaaagaagaggcgctcttaaaattagtggaagcgagtttataaaatgtaccggaataaaaaaaatgtgcagcaggcacaagtaaatgatatcttctgtgaaatgggaaatatcggaacaggggccagcatggcctcgctgtcccatattataggtgcagaggtgaactattcgccgtccgtcgtaaacgcaggcggatacgacggcctttcctcctggttcggctacgccggtgaaaatgtggctgccgtactgataccgttttgcggaagtatcgggggaatgattcttcaggtctatcaaaatgaaatggtaaacacaattctgggaggagtcctggagcgggagccggggagctgtgaactggacggccgtcatctcgatatattgaaagaagtggccaatataacggcctcatcttaccttacggcgctgtcggcctgctcgggctgccggattgacatttcggaagcggcagtttcgatggatatggttggagctattataacagaactgattggcacggccgggaattatggcggtgtgctgtgcatagggaaccggttcagcgttaacggggcggacgacagccacattctcgttatgcttgataaggaatccgcagggaagctgctggaggcattggaggtggagctttgaaacagatattaatcagaccggttcagctggctgtatcagaggagaataccgtgctggcatcccttgctctgggttccagcctggcggtctgcatgtatgatgtgaaccggcatataggaggcatggtgcatacgcttctgccccgggtgccggagaaagaagcggccgggcaggagctccggtacgtggatacttctattgtggctttatatgatgcaatgatggcaaagggcgccgatgcttacgatctccgggcaaagcttgccggaggagccagaatattcagctttgcggcccgtgagaaatatcgggagattggccgggaaaatgttgactgtgccaggcagaagctccaggaattgaacatccccgtgatttcagaggacacaggagaaaattacggaagaagcatatatttttatacagatgacggtaagcttgagattgaaacggtaaatcatgcaaagtacttgatatagctcaggcagaaggggagacatgggaaagaagtttaaggatttgaaaatcggaaggaaattgctgatttcctacggagctatcatttttctgtatatcattacggttacggcctcactgctggggatagctaagacatcgaatacacttgatgtattttatcagaaggcatttgcagtctcttatacggctctggatatgaaggcatccgttcagggaatcggtagatgtatactggatgttgccaccggcgttacggacagggaaaaggtagaaaaaattgccgaggcaagggagatggaaaacactcttgttgagggttttgcatttctagaaaaaaatctggaaagcgacgaattgcttaatagtctgaaggagcagatggcaaaggtcgagccggccaggaatacggcaatcgagctgtgtgaattaagccggtatgaggaggccctggaactatataacagctggtatgaaccgaatacaaaggttgagagagagactcttcagaaaattgccgataaatcgctggagcgcgccgagagttatcttaacaacggctatatggtaaaaagacggatgtatgcgtctgtaattgccctcgccgccgttgttctctttatcaccatattcctgtggataaaaatcacacgcggaattacggtgcctctcagagaactgcaggcggcggctgaagagatggcgaaaggcaatctggaagcagagatctcgtaccgttcggagaatgaaatcggggctttggccggcagcgtcagggatacccttgactgcctcaagacctatgtttctgagatggaaagcggtttatacgccataggaaacggccggcttacctaccattcaaagattgactacaggggagactttatggcaatcgggcaggctatggataagattacgggcctgcttaacagagccatactgcagatttccaacacggcggagcaggtggccgacggttccgaacaggtgagcggaggcgctcagatgctgtcccagggctctgtggagcaggcagccgtaatgcaggagctggccgcaagcatcaatgaaatctccgacaaggtcaaaaataatgcggacgattccgtgagagccagtgggaaggttgaggaagtcaacgctatagtggcctgcggggatcggcagatggataatatgatgcgggccattgcagatatccgggaaaattcaaaaaatatcggaagaattgtggaagagattgaggatattgcttttcagaccaatctgctttcattgaatgcctcggtggaggccgccagggctggcgaagcgggccgcggcttttcagttgtggcttcagagatccgcagtcttgcggcaaagaccgcggaagcttccggtatgatggcggagcttgcgcagcagacaggagagaaggtggacaggggaacaggcgcagcaaagaatgcagcggacaccctggaaaagattgtggagggtaccggtgaaatcatggcaatgattggccggatttccgaatcctccgtgcatcaggcggattcggtgcttcaaatcagggagggcatagagcaggtcattgcaattgtgcagggaaactccgcaaccgctgaggagagcgccgcggccagcgaggagctgtcggcgcaggctcagattctgaaaaaactggtggaggaatttgaattatcatgagtggagaaaaatgggtattaatcgtggatgatgcggcttttatgcgctccatgctgaaaaaggtgatagcgggagagaacggctttcgggtattggaggcgccggacggagcgcaggcccttaatctttatcaggaataccgcccgggtctggtgctgcttgatatttccatgcccggcatgaatgggatagaggtgttgaaggaattgaaaaagagagatccgatggcatttgttattatgtgttcggcaatcgggcaggagtcaatgatcagggaagcgctcgacagcggtgcatccgattttattgtaaagcctttcaaaccggagcagattaccgcagcagtcaggagggcctttccatctgaaaaaccagccggagcggagggaaacaaatgaatagatattcggagttaaacgaaaatgcccgcggcatcctgatggagattggaaacataggcaccggcaatgcggtaacctccctgtcccaaatgctggaccgtccgattgatatggaatgcccggatgtgaggataatggaatttaatgaggtacccggaatgcttggcgggattgaagaggtcagggtcggagtattgctggaaatcacgggcgatatccgcggaatctttatgtttttaagcagcgcgccttttctgaaggtcatgctggagggattgctgggaatggagatggaggatatcacatccctggatccgatgagcatgtcggcagtcagtgagataggcaatatcatgtgctgttcttatatcaatgcgctgacgaggatgctggacataaaggttgatgtctcagtgccggatacctgtgttgatatgataggcgctattttaagtgttccgatgattcattttgccaatatcagtgatgaactgcttctgattgaagacaaatatcactttggggatttatccgtaatcagtcacgttctgtttctgccggagatagagtctcttgagcagattttcagggcgttgggagaggaatatgaaaaatagtccggttatagttggaatagcccaagccggcgtcgcaaaacggccaagggagctgatcacgtatgcgctcggctcctgcgtcagtatctgtctgtttgacagaaagaattatattgcgggtatggcacatattctgctgccgcatcaggaggatgcaatcgaccggcagaatccctataaattcgcagacagaggctgtgaagagcttctcagagcaatgacggcgtgcggggccggccgggaatacataacggcaaagctggccggcggagccagaatgtttacgacctccaacacttcagaaggaatcggagcccgtaacgtcactgcagtcagggaggcgctgaagcttttgggcatcaggattatcgcggaggatacgggaaaggactacggaagaaccgtaattttaaattcggaaaccggagaggtcacggtgaaatcagtcagatatggaatatatgtgatttgacgggaaagatgtccgaatggaaggagagaagcatatgaaaagcaggcagacaattttagcaattgatgacagtttgctgatttgccaacagattgagaaggtattaaaaagtgatgagctggagatccataaggcctatacggctaaaactgcgctcgagaagctggaagagctgcagcctgatttgatattgctggatgtcatacttcccgatatggagggatatgaactctttcataaaatcagggagcacgaaaaaagccaaacgccggttatatttatcacgtcgatggacagcgaacaagacattctcaaggggttttctctgggggcctgtgattacataaaaaaaccgtttcttcctgaggaactgagatccagagtcaaggcgcatcttcacgataaacaggaaaaagatgagctgcgttccatgaatgaaacgctccgggctaatatggaaaagctgaacagggcagtattcagggatgaacttacaagcctttacaaccgccgttttgtggtggaaaagctggctcaggatttaatggaagagggtcgggaggacgccctggtgatggcggatgtggataactttaaacacattaatgacacctatggccattcggtaggagatatggtccttgtcggtatagccaatatcatggaaagtatttgcagaaggcataaggtgatacgctggggcggagaagaatttcttctcgtactgatggctgtcacgaaaagcggggtgcttgaaatctgtgaagaaatccgcagagagatatccgcctttccttttatgtgcggcgatgtggatttttcctgcacggtaactctgggagttgagatgtacgataagcagaagtcttttgacgagaacatagtctgtgccgataaggcgctgtatctggggaagacttccggcaagaaccgggttgtaatgtatgggtcagagaatgaaacaggagagtgatgccgatgggatattttgatgcggatatggaagatatgctggatatatatcttctcgagacgaaccagctccttgaacaggcggatgaaatcctgttaaatgcggagaaggagaagtctctttcgaaggagcatatcaatggaatcttccgggtcatgcacacgataaagagctcgtcggccatgatgggactgacggcgctgtcggttctggcgcaccggctggaggatgtcttcgacgcgttcagggagaatccgtccagactcagaggccttgagcaggaaacctttgatttgatttttgacgccggtgatttcatccgaagtgaactggcccggatgaatcaggagacgtatcagcccctggagccggtcggtttcgataaaaagatagatgagcttgttgcaagggcaaaagagaataagacctttgttgtccgcgtgaagtttgaaaaggactgcaggatggaaaatatgcgcgcctatatgacggtgcgccagattgcggaagaatgcagcgaaatacagacctatccggagcatgtggagacagagccaaagacgtcggagtatatcagggaaaacggcttttttatccgttttcagtctgaggacccggaccgtgttttcgaaaaactgagacaatccctctttgtggaatcggttggtacggccggtgaattaccgcaccaaaagaatgaaaaagagcagcaaccggcgcaggcaggcagtgactttatttatgtgaaggtcgaacgcctcgatgaattgcagaatctcacaggggaactgatgatagctgctcaggcggctgctgcgcataacggcgggaagagcgtgaaagatgaaaatacgggacgccagctggaacgcctgttaaaggatctggaagaacttgtaatatcgatacgcatggtgccgttttccggtgttgtccctcagattaaccgtatcgtgagggacatgagccggaaggaaggaaaagaaatatctttttcggtgaccggccaggaggtggaggtggataagaagattgcagacaatattcttgagccgctgcttcatctgatacgcaatgcgatagaccatggaattgagactccttctgagcgggagacggcgggaaagaacagaaccggccggatatgcctgaacttcgaaaataccggcggagagatacagatatctgtggaggatgacggctgcggaattgatacggataaggttttacagaaagccagagataagaagctttttaccggaaatgaagatgagtataccgagacagagctgctggaactgtgcctgctgcctggtttttcaaccagggaatcggcaaacgaatattcgggaagaggcgttggccttgacgttgtccggcagatggtcgaacagttcggcggacatctgcatctggaaagtaaaaagggagagggaagccggtttaccctccatcttcctctgactctgacgataattgacagtatccggctgctggccggggaaaactattttgcccttccggcccatcaggtaatacagttttttccgtatccccccagggaggcagaacggattctgcagggagggaaagaattctggcttcatgagggacgctatattcccgtcatatccctgcgccgtttttatgagatggaggacgggaaaaagacgggacgcagggtaatggcctatgtgaggggaagtacacgggaggcctgtatcctcgctgataaagtattagatcaggtgagccttgtggaaaaacctcttccgcctctgtttggccccatttcagatattatacgggaatttcggggtgcagcattctcggcgacggctcaatctgcatgcagcttgatatcgaagatttgatccggatggcaggaggtatgaagacgtatgagtgatggaagcagtatggacgaaaagacgtccggttttgacagtgaactcttttttgatgaagaatccgggcaggaggagagccgccgggataaattggaatttatgggaattgatatggggagcttctgttttggctttgaactggataacgttaaagaactggtccgcgatttgcgcgttacaaaggttccctgtctgcctgaatattatgaaggcgtatgcaactggaagggaaatatcatccccattgtctcattgaggcgcgccggcggtcttgctcctcttcaggataaagataatgtgatgcaggcattaatcctggtcacaaaggcagccggactggaatgcggttttctgattgagacggagccgcagattctgaatgtcttttcagacaggcaggtggaaggagaattgcctgacaagaacagcagtgtgctgacggtcgggaagatatttgaaggggaagataaaatcgtggctgtaattaatttggaagaatcgctaggaaaaatggtggtatacgagtaaaagaaagtggcgcaggccgccgtcctcaaaaatatgccgcaaaggccctgtaaccggagtgaaacattccgttagggcctttgcggcatttactgttggaaaacagatgaaagcagctggatgacggtttattttgccgcttcctctgagaaggcggttgtaacaagatcctcataaggaacgcgctctttcagttctcctgcttcttccaggatgttttccagaagttcgaagctttccttctcgaaaaccgtatcgtttttccaggtgtcctgctccttgtagcgttctataatcgttgcaatcgtggcagtgtcggtttccttaaactgcggttttattgtctctgcaatttcctctgcggaatgtgtgttcacgtactcaagtccgcgctggatggcattggtgaatttctggattatttcaggatttttttccagatagctcttttttgcactgtaggcagtatagggaacatatccggaatcaacgcccagagaggccactaccgttccgctgccttctttttcaagccctgtggcaaatggttcaaattccacagtgtaatcagcgtcgttgctggtgaatgcggctgcggttaagccgaaattgatgctctggtcgatggtcagatcggttttcgggtcaatgccgttcttttttaagatgtattcgaagatcatttccggcataccgcctgcgcggccgcccaacactttcttacccttcaaatcctgccaggagaagttttcctgggcagttcttccgacgaggaagttgccggcccgctgagtgagctgggcgaagtttacggcgtaatcgtcggagccttcctgatacacataaatgctggcttccgaacccatgaaaccgatgtcggcgtcgcctgaaatcagtgcggtcataactttgtcggccccggcgccgttaaccagcgtaagatcgatcccttcgtctttaaaatatcccagttcgatggcagcatactggggagcatagaaaatggagtgggccacttcatttaatgtaaccggggtaagggcatcggaggagcccccgctctgacagccggtaagggaggcggccgccatggcggctgtcagaaaaactgaaacaaattttttcataatactctcctgtggattatgtctatatgatttaggatattggaaaaactgtgggttggtgcctgttttccccgtgttttatggaaacaggattgttttaattgaattttcccgttacttcctttataatagcggctggggaagaatagcagaatgccgggagtttaattaatttgcaggaatacgggagaatgacagacggatggagaattatgaaattatcgttctggatttggacggaacgcttacaaaccgtgataaggtaattacaccgaagactaaaaaggctctgatggagattcaggagcggggaaagaagattgtcctggcctcaggccgtccgaccgacggggtgatgcccctggcgcgggagcttatgctggagaaatatggaagctatattctttcatttaacggaggaatgattacgaactgccggacaggggaagtagtattcagccgtcttctgccggtggaagcgaatgcaaagattatcgggctggcagaggaagagcgggtgaccatactcacctacgacggccacactctcataacaaatgacgctgaaagtccctattccaagctggaaaataagattaacagcatggaggtccgccagattgatgatttgaagtcttatgtgacgtatccggttcccaaatttctgatgatggatgacggtgattatcttgccatggttgagccgagggtaaaagcggctatggggaagaatttcagcatttaccgttcggaaccgtttttccttgagatactgcccagaggcatcgataaggcccagtcactggccaggcttttagagatactgggacttgacaaggagcgtatgattgcctgcggagacggctataatgatttgacgatgatcaaatttgcaggtctcggcgtcgcgatggaaaatgcggtgcttccggtgaggaaagcggccgattatattaccatgtccaataacgacgacggaattgcccatgttgtggagaaattcatgctccactgacgaacaggtaaaaataaatcaataaatatatggactttacgactttagtatgttaaaattgtaaggtactggtggtttacggaaagcaaaaatatataatgaagaggtgcttttacatgaataaaaaactcaagacagaagcggttgaccatttatttcaggcgattctgacccttaagagtacggaagagtgctacagcttttttgaggatgtctgcacagtcaatgagctgctgtctttctcgcaacgctatgaagtggccaagatgctcagagaaaagaggacttatctggaaattgccgataagaccggggcatctacagcaacaatcagccgtgtaaaccgttctctcaattatggaaatgacggttatgatatggtattcaagcggctggaggatcaggctgcggaggacaacgaagcgtaacaattatataaatgtaaaaatgagcgaaaaaggatcacggcttttagggaaaagcagtgatcctttttcgttgaccggatacagggcacgtactgcgtgcgttgaccgtattatacagccgtaccgcgtttgtgccggcgaggcagctgtattttctaccgggcggcgctgctttctgatttttccgctgagcgcgcatagaagttagccagcaccgcgccggaaatattgtgccagacactgaacacggcgcccggaatcgtggcaagagggtactgggcaaagtgggtggcggccagggaggttgcaaggccggagttctgcatgccgacttcaatggagatagcccggcatttgcttccgtccagcttaagcgctttgccgatcgagaaaccgagcaggtagcccagcacgttatggcagatgaccacagcgacaatcagcaggccgcttgtcagtatctttgatgcgttagccgatacaacggcggcgacgatggcaacaatggctgtggtggaaatcagcggaagaatttctacaatctgccgggtgactgcaaagaaaaagtgattgatgatgaaacctgcggcaatcggcacgatgacaaccttgacgatggacaggaacatacttgccatattgacgtcgactctcgctccggcatagacataggtcagaaccggggtaaggaagggagcgagtacagtggagacagccgtcatgccgaccgacagggccacatcgcctttagagagataggtcataacattggaggaagtgccgccggggcaggttcccaccagaattacgccgatggcaagctccggcgggaggttaaaagctttagtcagtccgaaagccagcagcggcatcacggtgaactgggcgatacatcctatgatgacgtccttcggacgggaaaaaaccaccttaaagtcacccggcttcagcgtgagacccattccaaacatgacaatgccgagcagggtattgacgtaggaagttttgataaagcttacgctctgaggcgcaaacagggccagggcggctactgcgatgacgatgacagccatattctggccgaagaagttactgagttttttcaatgtgttcataataaatcccctttcaaatttgtcggaatgggcagagaagaattaagaaagaattccgcgggcgggattctccgcctgcaacaaaaaaacctctgtctccattaagagacaaaggttataatcctctgcggtaccactcttgttgccgttaaacggccactcgtccacatctgtcaatgtgtaacaggataacggctgttaaccgttcagtcttactggtaaagctgttcagtctgaaagctcagaggtgattttcttccggtgttcctgctgactcgcacctgccgtcagctctctgaaaggatacgggacggaatacttttcctcgtcaaagcttgttgttgctggctatttaattaagagtgattctaccgcgttaaagcagatatgtcaatagccggatttgcctttaaaaaaaatccgcttgattgatgacggtgacctgtgcgcggagcgtgcagtttatcgttctggctttagccagttgaaggcattggagtttttcgtgttccgaaaaatgataatgcctgaaacaggaaaccacctgctttgcgggtggtgcagcaagtgcttatagcacaaaaatcacctttccgatagaatagagttgttcaagctactatctaagaaaggaaaggtgattttaatggcacacaagaaacatgatatggcacatacaaagtggatgtgcaaataccacattgtgttcactcctaagtatagacgaaaaatgatttataatcaatataaagaaagcatacgagatatattaaaaacgttatgcggatataagggagtggaaatactggagggtcacttaatgccagatcatattcatatgctggtaagtattccaccgaaatacagtatatccagctttatgggatacttaaagggaaaaagtgcgctgatgatatttgataagcacgcaaatctaaagtataaatacggaaatcgtcacttctgggcagaaggttattatgtcagtacagtaggtctaaatgaggcaacagttaggaagtacattcaggaacaggagaagtatgatatagcaatggataaactgagtgtaaaggaatatgaggacccctttaagggtagccggtattacaaacgccttttaaaggggggcgacgagtcaagggcatagtggcttgaacagagtgaaagccagcgtctttaggcgctggccggtaactgtccccttatagggcgagcaaaccacccgtttgacgggtggtcatgattttatttgtcctcccttcaaaaagagggggcttaccggagttactttttcttcttcggcggattctcctgcctcagctgttcggccagtagttctatcatctgttttttcagatacacgtcgaatgccagctcacagatgaaggaaaagagtctaaggtattcctgatcgtcaccctcagcgtcctggaaggttccggaagctgccttaaatttcgccattacatcgtctttcagtcttttgcgctgctcacgctccagtgaaaaaatctccgtgtacagctctgccagttcaggattagaaccgtccgcaaaatgattttcgctgatgggagaaaaaagctgctcaatatcgttgaaagatagtacatttttaaaataatagataaaaatcaacagcaatatatggtttttagaatatttctttttctccggcggcggaagcaggttattctttgcatagttattaatcatggttttcgtcagaatcttatcttcaccaaaccgcttggaagcagataaatgtgtatccatgaaagtggtaacctgatccatatataaatcaatggcggggatatcagacggattgattctggtcacactgtccagataagccatcagatcctgcagtcgttcttcattcgttttcataaaattcacctcaaatcttattatatagtaatgaatactagatgacaagacctaaaagctgtttattttataatgttgtcagtgtttttattgtccgcactgcggcgtttgctactgtccgcatgccatttccctgatgctgtatcgaggaagcaatacagggaattcacctgctcttttggaaaacagagttgacaaagaatgtatgttcgtttagaatgttagtgtgcttacatttttggacaaagccaggagcggaaaagctgattcagattaatttaagaggcaggcgtccgctcccgaagccagcttgatatttttaaatatagggaaaaagcattcaggaaggaaataaagatgacagttaacacccatgtcggatttgaaatccgtgtattatctaatcttatttaccgcagaatcaatcagatgtcggcccaggaaggggagacgctgaccgcgaaccaggactgggttctgcattttttgattcagtcgcaggggagagatatcatgcagagggacattgaaaaggaattttcaatccgccgttccacggccagccggactctgcagctgatggagcgcaacggatatatccgccgggagccggtttcctatgacgccaggatgaagaagctggtagtgacggaaaagggagccgaggcacgggagaggatgatagaccgcctgaaccggtttgaggcagagcttcagtctggaatttcccgggatgagcttaatcagcttacgcgcacgataagaaagctggaagaaaatatcaagtagaccatgatatggcgcatattttaacacaatatgaaatagttattgcaggcaatgaaaaaggagaattatttacatgaacacaaacagagaattatttgaggaggcgccggtccccaaagcggtggccctcatggctgtccccaccatgatttccatgctggtggtagttatttataacatggccgacacattttttatcggccagaccggagatccccttcaggtggcggccgtttcgctggctacaccgatctttatgatttacatggcgctgggcaacctgttcgggatcggcggaagctccgccatatcgcgtgcgctgggagagaagcggatggaccgtgccagaaacctgtcgtccttttgctgctacggctctatcggcctgggcataatagttgcggcgctctttatagccggaatggatttgattctgaagctgataggagccagcgcgaatacaattgagtatgccagacagtatctgacctacatatccttcggaggcccatttatcatctttgccactgccttcggcaacattctccgggcgagggggcagcccgggagtcaatgataggaaatctgattggaaccgtggtcaatatcgtactggatcccgttatgattctggggctgggctgggggtaaccggcgcggcgatcgctaccgtcatcggaaatattgcggccagcgccttttatcttgtctatttcctcaggaaaaaatcttccctctccattaagcttaaggactttaagatgggggaacggatcgtatccggtgtggcttcgattgggattccggcatccctgaataacattttgatgagctttgccaatattattttaaatctggcattggttggatacggtgacactccggtagccgccatgggcgtggcgatgaaatcgaatatgctggtggtgcttctgcagattggcctctgcgcaggcatccagccgctgattggttataattacggagccaggaataaaaaacggctgatgcaggtcttccgatttaccggtatatgcgccgtgatcatgggtacggtgctgacgattatcatgatgattgcacgccggacgctgattcaggtatttataaacgataccgaggttattgcctatggaatccagatggtcattgcccttcagctttccggcccgtttatcggcattctgtttctctgcattaacacaattcagggaatgggaaaggcgctcccgtcattggtacttacggtctgtcgccagggcctgatttttatccctcttgtatttattctggatcggatgttcggactggacggcgtaatttatgcgcagcctgcggccgattatttgtcaattgtattgggcattatcatttgtttctggctgtttaaggcaatggcgcaccgaaacggcgcagaggaggaattctgatatgggagaatctgtggtggaacaggtaaaagaaaatatatacaggctgggcgtaacgctgccccagaatcctttaagggaactgaacagctatctgatccggggcggggagcgggatcttctgattgatacgggattccgccgtccggagtgccgggaggcgctgatggcaggtataacggaagccggcagcagtacaagccggatcgatgtgcttctcacgcacctccactccgatcataccgggcttgccagggaggcggcggccccggacggccggatttatatcagtgagacggattttaaggtattacaggagggttttcttccgcagcgaagcctgctccgtcaccgccagtttttggaggccggttttcctgaggaactgttaaatgtaacagaggcggttaatccggcgtcccgctataagctggatgcgctggacggacgcttttgcccgctgcgtgaaggtgataagatccaggccggcccatacagtcttacgatgatttccgtgccgggacatacgcccggcaatgcaatgttctgggaagagaagcatcggtttatgtttacaggagatcatatcctgtttgacatttctcccaatattacatcatggctgggcgtggaggactctctgggcgattatctggacagcttaaaaaaagcaaagaagtaccctgtggtttttgcactccccgggcacagaaagacgggaaattatgaggagaggattgaacagcttctgcttcatcatgaaaaacggctggaggaggtcataaaacttctcgaggaaaaaccggatatgacactttatgagctgaccggaaagatgcggtggaagatccgggcggccagttgggaggatttcccggcggcccagaagtggtttgcggtaggggaatgtatggctcatgcggatcatctggagaagcttgggaaggtcagccgttattttgaggacggtgtctggaggtaccgggcggaggtatgatgagcggaccttaaatgaatagatggggaaaatccccaatattaatattggctacagggatatgtatagtgcaaatacaagtcctgtagccattttttgaattataagagaacaatcctaaacggcattaagtatgtaaaaaactgttttgcttgaaagattggttgttttgggacgaagattgaaaactgatggagaaaaagattgacacctttaaacttgaatgataatatgaagaaaatcgaagaaaggggaaaatatgagtaaatcatcggagttaaaaaaactaatccctatcagtttaagtgatggaagagaacatgacattcaatttataaaaaattatttagagagcgaagaaggcatgaaatatgaacaagacttcacaaaaggtgtgttagccggagcaatacactcattgactcaaaaaggtataatctgtaacattggcagaggagtttataaactttctactttaacagaaggcaacttaacaggagatgaagaaaagaagaaggaatatttgaaaaatgaagaattggtaaatgaaagtgaagaaactataggcgtagaggataaacaactttattataaacaagaagatttaatggaggagaagagagaagatgcgcaaccggtacttgacttggaaaggtacgagataaagtatactgttttgggtaaaaaaagaagtttgatcacaaaatttttgaaagacgaatataaaaaacttttggactatatggatgatatcaagttatctgatctaaggacggaaagcttggattatacaaatgaattagtaaaggtattagagtgtttagagaattttgacaagaagttttaattcaatgtacttgatattcgtatgaaaaggatgaatgcagattttaagaagaaatgctctcataagaacttcgtaagttaattagaggcatttatagacaggatcagaaggctatgaaggggaaggacttcttgatgcaatagccagattgatttcaaagatattagataaatttatttgaagaagagatgggatatatgctggataaagaaaatagagatttgaaaaaggggaaatgttttgtcataatgccttttgtaaagcaattagacggttattataccaaattgattaagcctgctgttgaagcattacaatatgaagtaaaaagggcggatgaaatttacagtgttcaggctatcattgatgacattgtaaatgagatagagagttcggattttttaatagccgatgtaacgggaaagaatccaaatgtaaactatgaactggggtatgcggatgcgttgcataaagatgtgataattatcagtcaatctatggaggatgtcccttttgattataaacatcgtcgggtgattttatatcatcctatggaagttaactggcaagaaaagttcctcaccgatttggaaaagacaatcctggttgtagagaaaaagcaatgtggtaagatgggaagagagatagcagaggtggtttaaaagcagaaagtcagtatcattacgccggcttctggtttgagagtttttcgtgacatacacaggaaaatatattataataaatttcacgttaccctgaatatggaatcagataaaaggcggtagaaaatatgaacaaatacgaattactcaatccgatgcagcaggaagcggtatatcatacggaaggtccgcttctcgtactggcgggagcaggatcgggcaagacccgggttctgacccacaggattgcgtacctgatagaagaaaaacaggtgaacccatggaatatcatggctatcacttttaccaataaggcagcggctgagatgagggagagggtagacaagattgtcggcttcggcgccgagagcatctgggtcagcacgttccattcctcctgcgtccggatcctgcgcaggcatattgagtacctgggatacagcactaattttacgatttatgacggggatgatcagagaaccctgatgaagcagatatttaagcgcctggatgttgacacaaagcagtttaaagagcgggcggtcctcagcagaatctcttccgcgaaggacgatatgatcacgccggaggaatttgaactgaacgccggaggcgatttccgggagaagaaggttgcccagatttataaggaataccagaaggagttaaagaagaataacgcccttgattttgacgacctgattgtaaaaacggtagaactgttccagaatgttccggatgtgctgaattattatcaggagcgtttccgttacataatggtggacgagtaccaggataccaatatggtgcagtttaagctcgtcgatttgctggccggaaaataccggaatatctgcgtggtaggtgatgatgatcagtccatttacaaattcagaggcgccaatatcgagaatatcctgagctttgagaaggcatttccgggggctaaggtaattaagctggagcagaactaccgttccacccagaatatcctgaacgcagccaatggagtgatacgcaataaccggggcaggaaggataagacgctttggacagccaacgacgaggggaatctggtccggttcctgcagtttgatacggcctatgaggaggctgaggcgattgtaaaagacatacgacgggaaaaggaagagacaggcagggaatattccgactttgccgtgctttacaggacaaacgcccagtcccgtctgctggaggagaaatgtatcctgtacagtattccctatcgtctggtgggcggcgtgaacttctatcagagaaaagaaatcaaagatattctctgctatttgaagacgattgccaacgggcaggatgatctggcggtacagcgtatcatcaatgttccgaagagggggatcggagccacctctgtcggcaaggtgacgatatttgcgtctgccaatgggatgagcttttatgacgcccttctgcgcgtaaggggaataccgacccttggcaaggcggctgacaagatcggtgtttttacagagcagattgaagattttaaagcacgccttccggagatgagcatcaaggagctgatcgaagaagtgctggagaataccggatacaagaaggaaatcgaggcggagggcgagattgagtcggaaacacgtcttcaaaatatcgaggagctgattaacaaagcggtcagctacagtgaaaatgaggaaaatccgactctggacggttttctggaggaagttgccctggtggccgacgtggacaatatggatgaatcggagaaccgtatcgtgttgatgacccttcacagcgcaaagggacttgaatttccctatgtatatttaagcggtctggaggacggcctgttccccagcagcatgtcgattatgtcggacgacaaggatgcggttgaggaggagcgcaggctctgctatgtgggaattactagggccagggaaaaactgactttgaccatggcaagacagcgtatgacgaacggggaaacgaggtattccagggccagccgcttcgtggaagagataccggcatggcttctggagcaggaagaacagccgtctgtatttggcagggccgctggcaggtcatggggaggcagcccatccgcttcctcttcggacagaggctttggagaagcggcttcgtccggctggggcggagccggctccggcgtccagggttcatccgccaatcgttcatggggacgttccggcggcattacgaccggatggggagctgcgtcgggaggcggcgcaaccgcctccggctttggaagtacggcagggaaccggcagggagagggagtcagcacatttggcgtgaaacccaatgcgtatgcctcaaagacagcgccggctgccccctccttcggcaaagcattttccgtacaaaaagcggatcatctgccatactctgagggcgaacgggtaaaacatgttaaatttggcgagggtacggttaaaaagatagaagatggcggcaaagattttgaggtcacagtggagtttgaccgggtaggcgttaaaaaaatgtttgcatcatttgccaaattattgaaggtttagaaaaggatgcgcactgcggcggaaggattggcggcgcttacgtgaaatttttcttatttgatcgccatattgtgtaaaatttgaaaaaggacaaaaataggatagtaaaaacatgatattggtgatataatataaaggaaaaaacatcggtgcaggatcacggaagaaaggatgtggaacctatgaataaatttgatatgatgggtaaggatgcattgtcaaaagtagaagaaatcatgaatgcaacaaagctgaatgaatttttacacagaaaagaagaggaagagaagaaaaaaacatgtattctttggattctcgctattatcggtgttgtagcggcagtcgcagcgattgcgtatggtgtatacagattcttcacaccggattatctggaagatttcgaagacgattttgaagatgacttcgatgacgacttcttcgaggatgatgcagaagacgacaaagaataaaacgctgtgtgatgcgataaaatgtatctttttaagtacaataagataagagaggcgccggaacaggcggccgtatgatacggtcgttccggcgccttattgattgattgattgagggcggtgacctgtgcgcagagcgagcagattctgcgcgtctgtccgcagctatttgatgtcatttgttacagtcctgtcagttcggaaagctgctccagaattccttttccgccgctcacggaaatattgcccactttatcgcagattttctctaaatattccatttctttgagcttcaataaagttttattttcatccatcagctttgccgtatttaacaggctcctagtggatgccacctcctcacggcgcatgattacgttagcctgggcctttttttcagcgaccagtacggtattcatgatgtcacggatttcgccgggcagaatgatatctttgattccggcatttaagatttccacgcagtagtcatcctgctccgcttttaactgctcacagacggagcggccgatctcatctttctggacaagcagttcatcgaggcggaagcggcccacatatttcctgatacataattgggcggcagtatagagctgcgcggaagctccctcgattgtcctgaccagcttttccgggtcagtgatccggaagttgcataccacatttaaccggacgcttaccttatcggcggtcaggatatcctggccggagatatctaactgctgtgccttcatattgaaaattttgcaggtaacctctttgctgtagttccagaaataccagttgccctcctccagccttttttcaaacttgccgtcaaaatagagcaggccgatctcaccgtctttgatggtgatttttttatagaatttgaccgggatcagatctatgtaatatcttggcagggtctgatccatatacggattcgtgatatctaccaggcggatctccacatcttcaaacacgttccagtataaagcctcgggacctgtcaggacctccttgaatgctttgttgacaaagcggatagccagacattcgtccgggatatttacacggattacacgctcggaaaattctttgtttttcatcagaacctcaaccggaatcccgcaggtgttgacggctccggtcatcgggacaattttcagctcatagcccatagcttttatgtaatggcaggagccggcggcgagaaagctttgaaatcttccgttttttaacaaataaccgcattcttgttctttgattatatatttcataaatgtttacctccatttaaatttggttctctgtgatttttttgaaaagcagttttagagcagttacgtcccttcttcaccaaaagtctgaggacctttttttcagtaccggttttgccctgcggctgagaggcgctgtatcagccgcctgctctggcacagagtctgccggaacggtatccaaatcggttctggcagttttttggctgcttcttaatgcgcaatctttggggaaggcggcacggccgttcggcggtgcgtaccctgaccacgcagattcgcagaaggaaacggaagaaggggcgtctttaactctgtgatggtttggccaacatcttatcaggatgttccaaagtttaatgattgctataccacttagctacatgctttcgcaaggaaggattcgaaccttcgacacatcatgttatgctgactggccggaatacctgccgatcagggacggaggcaccgcgggggctctcctggagataacccctcgcctgtgagacagcctgcaatgttttgagagttatgtttctcatgaatttatcataaaggattgtgggagaaatatcatttaaaaaaagttgcgaacttgttactgtttgcagaaccgcgttttttacggggctgagaatagtaatgcggacttcctgaagagggtaagaaccatattaactgggatacgggcagagggaggctaaatgatagaatcggtttgacaaggcgaaagccagacggtagactggtcttaaagaagaaaaaatcggtttgagccgggagtgatggacttgagccgggtgaagagataagccttgatgaatgtgatattacataattaagataaatataaggatgtgggaagatggcggaatttcaggagctgattaagaattttgaccgtattcgcgactatatgcggcagttttatgtctacgggttcaaggtgaggggcgattatgatgttaaaagcgccaggacctatgataacgagaagcgcaggattgagagctggctttctgagtatatggtgtcggaatatacttcaaagggaaaacaggtttatatcaacgtggacagcaggacaatcaggcagaaccctctctatgcggcatggaaggcaaagagttttaccggcaatgatatcatgcttcatttttttatcccggctcagctttatgagaagcgggagggactgagtgcaggggaattgggggatcggatagcggaatgctacggtgtggttttcgacagccagacggtgcggctgaagctgaaggaatatgaagagatgggaatcctgggtacggtaaaaaagggaaaaacgctgttgtatcatttgaagccgggtttgcaggaagacagcttcctgcctcttttaacggcagtaaagttttatcaggaaggggcgccctttggttttatcggcagcacgattctggaccgtgagaattctgaaaatgacagattccagtttaagcatcattttattgtacataccctggaggacggaatcttatttgagattctggaagcgatgagggaacaccggtggattgagtttgtcaataaaagcagccgcagcggcaacgagtcttccatgaaggggctgccccttaagatattcgtcagtaccaggaccggacgccgttacatatgctgctatctggagaaccggcgccgttttatgaattttcgtctggactgtatcagtaaggttaagatgacatcagtatgtgaggattatgctcaatggaaggcagcgcttcaaaaaaatctggggttgtgctggggcgtatcttttgggggcaccggacgggggaagagatatcggtgaaattctatatcgatgaggagaaggagtcctatatcctgaagaggctttaccgggagggacgcggggctttggtcagaaagacgggagaacacgaatatctctacaccggaacattttttgataccaacgagatgctttcctggctgaaaacgtttaccggacggattctagatattcagtgtagaaaccgtgcggtggttgcgaaggtaaaacgggatctggaacgaatgtatgagatgtactgcggagatgaaaaagatggagttatttgaaaagatatatagctgctattaccaggtggttgggcagattttgagggagtcagagaggcatccggttacagtaaaagagatggaaggcatcatccggaaatatggttttcaagaaagcgtccttacgattcttccaaatctgaccggcggggaatgggccttcatgaaaaaaggtagggacggcacgtatactccggctgtttcgcatctgccgaagctgccgcttaccggactgcagcagagatggctgaaatccataattgcggacagaaggataagcctgtttctaagcgacagcgatctggcgtgggccggggagctgctgaaggatacggagccgctgttcgacgaggaagatttttattattttgacagatttaaggatggggataactataactctaaacaataccgggaaaatttcagaagcattcttcaggcgcttgaaaagaaacaggcgttatttgtcgcctatgaaggaaaaacgggtgatacagttacgtatgagacgctgccctatcagcttcagtattcttcaaaagacgacaagttccggctttgcagcctggaatacagccgggggaatttcagacgggaattgacactgaacctgtctaaaatcagggcatgccatccttcaaagcgcgaggtttccatagaacctgcagagtacagattttgcaacagaggaaaatcacaggagccggtagttctggaaatcagcggggagcgcaattcattggaacggtgcatgctgcaatttgccaactatgaaaaacatacggaatttgacgaggagagaaaatgctggatttgttccatttattatgataaggccgatgagacggaactgttaatcgatatcctgtccttcggtccggtggtgcgggtgctggggccggagccgtttctgggacttattaaggccagagtcaggaggcagcacaggttatttcagcaggtatgagcagactactgttcacacggttgtgtcccgcgaggtattttcatgcgcattctgcacgaaaatacctcgcggaacacggcgggaaacagcggtttttgccgtttctatgcatcgcggagcatgttacagcttgcaggaccatctttttgcggggctgtgaactgtaacatgggcaggggacgggaatgagccggattttgcttttcatcagctgttttttcgtgtatactggtaaagccagtagaaagaagaaagaagaaagaagaaagaaaacggagcaggccgcggaaacagggtacggattacggcggtggatgaaaagatgcgcatcagcaaaagtgctgtggtttcaaggtctgacgaatttataagaaagtataagaaaactgataaaaggagtttatattaatatgaaaaaaggtgagatttatgaaggaattgttgaaaagattgaatttccgaataaaggaattcttcatatagaggatgagaaggtcattgtgaaaaatgctcttccggggcagaaaatccaatttcttgtgaacaaaaagagaaaaggcaagtgcgagggacgcctgatgcaggtcctggagcggtccgaaatcgagacagcggagacagtatgtcctcattttgggatatgcggaggctgtctctatcagacgattccctatgaaacacagctggaaataaaaaaagagcaggtgaaagagctgcttgacggtgtctgcggagagtatgaatttgaaggaatcaagggaagccctctggcggactgctaccgcaataagatggaattttcttttggcgatgaggtgaaagacggccctctggctcttggcatgcataaacggggcagcttttatgatgttgtgactaccggcgaatgcaggatcgttcacaaggatttctgtgatatcctgctttgtacgaaagcgtatttcgaggaaaaagaagttggcttttataagaagatgcagcataccggatacctccgccaccttctggtgagacgggctgtcaagaccggggagatactactggatttgattacgacaacacagattggagtggaagaggagaagaaactcctggccggatggctggagcgccttctggcactgccgttagaagggaaaatggctgggattctccatacaaagaatgactccctggcagatgcggtgaaggatgaggggacagaggttctttacggaaaggattatttctttgaagagctgctggggcttaaattcagaatctctccattctcatttttccagacgaattccctgggggctgaagtattatatgaaaagacgagggaatatgtgggagagacaaagggaaaggtggtatttgacctgtacagcggaacgggtacaattgcccagattctcgccccggtggcagaaaaggtagtgggagtggagattgttaaagaggccgtggaggcagcgaaagagaacgccaggctgaacgggctagacaactgcgaatttattgccggcgatgtgctgaaggttgtggatgaactgacagataagccggaactgattgtgctcgatccgcccagggacgggattcatccgaaggcgattgagaagattatcggctttggcgtggagcggatggtgtatgtgtcgtgtaagccgaccagtttggcgagggatctggtgattttgcaggagaatgggtatcgggtggagaaggggtgttgtgtggatatgtttccggggacggcgaatgtggaaagtattgtacggttgaagaaaagtgtaaaatagtgaaacaataaacagatttaatgggctggttgggatttgtaggaatatatatttgcagaatttttaataactggaaattagagcggaaggtaaggtgtctggtccgtgaatcgtgagattgaatatgttaatttggatgtaatacgatataaggataattaatggactagggaatatttaaacctataattttttgaggaaataaagattgaggaaaagaaattatgacaaacaagaagaaagagattacaatccatagttcagccgctgagtatttaacatatgtagcatctacaggtcgtaactcagatagttttgagatgcgctatgaggacgagaacatctggctgacgcagaaaatgatggcaaccttatatgatgtttctgtatcggcaatcaatcagcaccttaaaaggatatttgaagatgatgagctggtagaagaatcagttattaagaaatacttaataactgcctcggatggtaaatcctacagtacgaaacattataacttacaggcaatcattgccgttggctttaaagtgaacaatgatcgtgccgtaagattccgcaaatgggccggtcagattgtcaaggattatacaattcaaggatggacgatggacaaagagcgcctgaaaaaagggcatatgttcactgatgaatattttgaacgtcagcttgaaaatattcgtgagattcgtctgtccgagcgaaaattttatcagaaggttacagatctctatgccacagcgtttgattacgacaaagatgccaagactacccggcagtttttcaaaatggtacagaacaagatgcattgggccgtacatcgtcatacggcagcagaattgattgtagagcgtgcaaatgccgaaaaagaacatatgggtttgacaacatgggaatcagcgccggatgggaaaattgtcaaagcagatgttactgttgctaagaattatcttagcgaaaaggaaatgtcctatttacagagaatcgtttcactctatctcgactatgcggagttacaggcggaacgaagaataccgatgagtatggaggactgggcaaagcgacttgatggttttttggagtttaacgggaacgaactgctgatgggaccgggaaaagtcagtgcggaacaggctaagcttcatgcagagactgagtttgaaaaatatcgtattgttcaggatcgattatttatgtcagactatgataaatatttaatagaattagaacatcaagcggatcaaagtgacgtgtaaagataattataccgtttccgcttggggaggagtataccttctcgccatcattattatctactcaacaaactgcgagacaattgtcgaattatgtcgaaaatagaaatgcatgaatccaataaaggacaggagaagcagccatgaaaattataaagaattgtattcaatgcaaagcatgtggtgaggtgattgaatcaaattccatatatgatttcgtgtcctgttcttgtgggaaatgcagtgttgatgggggattagagtatctccagcgagtagcagaaacaagggatatttttgtagaaatgtcgtagtttgaagaggattggttttttgctggctgtgttaaaatcggtaccagatgctccagagtaggagcaggaagcgaagaatctggaaaataaaatatgggaatctaaaaagcagaactatatcttgcagaaagtcctattggatggcgatattagttctgctatttttaggctctttgtcaatagttggggtgggatttgttaaaatcccgccccaattctatgaaaagggccctttttatgtttagttccaggttttactgattttgggcatgccaaataagcctccgcattaccgacctttttatcctatgatgtacagtgaagtatccgggttcggaaccgtttgaaattccggattccgtagctgctccgttttaatacctttatcttgttgttaaatccttctgtgggaccatttgtcagcccgtatttaaaggcattcaggatttcttttcgccaggccctgtaggtcttagcacaggcctcaaattccttgatcccacagctctgcgcattcgcaatccagtcatcaaattccctctgctgctgacgatacgcttccatctggcagatatcatagaaccactctttcatgcggtgtgccagacgcagatcctcgctatagtgaagcattaaatcacaggcctgtttgttctcatccttcagctttttgtagcgggtcagaatgagtttccggctgcgtttataatacttacgcagagaaaccggcatggagcgctgcagccgtttgcgtacattttcaatcgcccatgtcacctgccggatgaaatgatatttatccacgatgattgtagcgtttggaaagaaggtttgtgcaagttcggtgtaggggcgccacatatcgcagacgaagaactttaccttcaggcgttctttcctgggaatgttccgccaataatcagccagatggctctgggtccgatctgggagaatgtcgaggagccgacgctttttcggatcaaccagaatgcactgatatttaccggtagaagcattgcctttgaattcgtcaatggaaagcgcttgtggaagctggtcaggtggaggatagcaaatcgtgtccagaaggcggcagaccgtctggacggaaacaccggtaagctctgcgatctgttttaaggaaaaggtctgccggagcagggagacaatgtaaaatgccagcctgcgggtcctgcggtggtagctggggaggaacgaatagggttccgtgaaccgtttgcggcagtatgggcagaggtagcggcgtttgcgaagaagcaggattacttgttttcccagtaagggaatgtcctggacttcttgtaaacggtaatcatgaatccgttttgttttagccccacagcagggacaagtctgttctaccggttgggactggatgaaaattttaatgaaagagtctgcctgaaccacttttttaatagaaacaccttccaagttaaggaaagccttggtataattagggtacatctataaggggtcacctccataacattaaactttggtcgggataatgcgtttaggaggcttcttatagatgtattttattacaacgaaaagaatgttggaagtgtgcttttcagcacaccccaacattcagtatagaacctatttttataaagtaacgtacttggaatgatggcgaactggattcgacatgccataggcggtatgaacaggaatggagatggcttaggtatcagcagaagttgatcagaggttgagaggttgatttctgctggcgaaggggatatcactaccaataattgtgttctcagacagaaagttgaggatttaattgttggttgtaattaaattgggataatatatagcaactttattattggtgtaatatcctttatagtgtataatatgattaatatattccttatcaaaacggttgttttgcctacgcttttctgaggggtaggaaagacgctcatccctatattgaaaacgtatgggggcatggcggtttgaatttccctgtcttccaggtgctcaatgatggtttttggctgggctcctttttctgcaaaaatggttccatgcgtattgcggagataatagctgtgaaataatggattgcccagttcttcgggtatgacctttgcacagttttttgaaagaaatttaacgtgtagagataatggtatgtttgtgttaaataccgactaattttgagtcggatagcgggaggatcttattgtatatgtttgagtttatgaagacattaacattacatgtgagctacgaatgtttaaagggcgggacacttcctgcctacttaggttcaacgatacgtggactcatggggcattgcattcatgaattctattgtcatcatagaaatgtaaagtgctttttgtgtgaagatagagggacatgccagtatgttcagtgctttagcaataccggtggcgaggcaggggcagtgaatccatatacaatctatgtatacggtcagggaaaggaaaaatgggagatcggagattactgtgtctttgacattaccttattcggcagtggaacagagcatgcaggagtctatctggatgcgttgattgcagcagaacagaaaggctggggagcggaaagaattccgttccgtctcgtgcatgttacggatcaggattccggaagattgatttatgccggcggaaaaagctggattcgcaacttgattcccagagcagtttccgtaaaagaacggaacgccgcatatgcctgcctggtttttgacacacccttaagggtggtctccggcaacaaattgtttcaaaaattgccttttgacatggtgatacagtttttgacccggagaatttctcttatgacagcaaggtatacggattttaacctggagtgggatatagaagagatgatgcggcaggccgcggagatcagaacggttggggagtcctggaaagagattccttttttcagatattctatgaaccagagggatgggaaactggaactcgcgtctaaaatgggttggattttgtacgagggggacttatccccgtttgtgcctgttctagagctggggagccgtcttcgactgggaaaaggtgcaacgattgggtttgggcattataatatttattacgataaataaatttaacgatagtgagcggagggatgaagatggcttgggttactacctacgatgagatattattgacgattgccaagaactataaggatattgagacatctatagtaaatcagcttttgttggaggttccgaaccattatcctacggaaggctcctacagagaagccgtgtgggaatcactgttcaaaatggttgttccaagaaaatactgtattgagcagggcgtatttattattgatgcgtttggacataagtcaagggaagtcgatctggcaatttttgatgaactttatacgccgtacatatttaattatggaaagataaaattcataccgattgaagctgtggcggcagtggttcagtgtaaaggtgaattcccagataagaaagcaattgaatcatgggaagaatccatcagtgcgttaaccacatcgatggactccgtggccagaatggcaacttacatggcggataatttggataatcctcatggcaggaagaatgatttaactcaaaccgcaacccgcccagtgaaaatattgtgtacacttgcaggaaaaatttttttagacgaatacaaggaccgtttcgatataatcctgtcagtagataaggaaaataagaagttgtataaaagtataccaggcgaaatgcaaagtttagagaattggaacgattcaatgaatcatgcgatgcatgggctcaaggatttacaggataaagaatacagagaaagcagaaaaatgagtttaacaacgaagagggagaaccttcttcaggaacttaaggtaccgcagacagttaacaatgatgaggaggaagagaatgtaatcctctctttgattttccaactgaaccagcttcttatggtaatcaacaatcccatgttgttcccgcatcatgcctacgcgaaacaattcagcgatattttaaagaagtccgagcaaaacaaaggagaaaatggggatgggaaataataaaagtgattatattttagcaaaatttgacgtcggaggcatccaggattacatctttgccacgaaccgcttgcgggaaaatgccggcgcctcttatcaggtgacaagaatcatggaagaatttttgcttgagtcatttcgggaagccgcagatgagaaaaacgtggaggtactcctggactggaagctggcagatcgactgcgcctgccgcaagacgagaggatgatggctgaagtcatttatataggcggcgggaacgcagtggcattgtttcggaatctggaatttttttgcagggtgggagaaaaactggggattaaggccgcggtaaaatgccagggcgtctatttaacggccgcatacatcgagacggatctgtctgattttgcagcagacagaagaaggctggatcaggaaatgaatgaaaagaagaagcatatgatccgtcagctggtatactctccgtttccggttgtggaacaggaggatggaagccaccagccgatcaccgctcagatccattatgaaacggaatcggaaaatgtaacccggattcagctccagaagcggaacgcttataaagatattgtccattataaacgtctgtttccggtattggacaatggagtcagctatggatatccggaagagatggaccagctttccagagagtatggggaagacagcatggttgcggtcgtccacattgacggcaacgggatgggcgaccggatgaatgaacttctgggtgagcatatgggctatctggagggagttccgatcatacgcagagagtcgaagaaaatagcggggctttttgagaagacgtatcacgaggtacttcaggagttgtgggattgtcaggtcttaatcaggggaaacgggacagaagaggagcgcaggatttttcctttgcgacctatcctgatggatggggatgattttacatttatatgcagggcggagctggctgttccgattgcagcgggcttcatgatgaaactgttgcagatgcaggacggtgaggaaaagaaaataacagcctgcggcggtattgcctttgttcacagccatttcccatttcgtgtggcctattcaatcgccgagaagtcctgcgggcaggccaagaatgcgtggtatgaagaaaaaaaacagaagagaagcgcgatggcagtatgtttcttggatttccaagtgataaaagacagtgaggtgggattttcgcttaagaatagaaactatcagaaacgtccgtattctctggggattgacgaaaatagaaccagggacaattctttagagtcattatatgatgtattagttaagatggaggaggactggccatcggggcggctgcataaaatgtaccgcgcgtttttagaaggaggccatgcgatggaatttctaaagaaggagtttgtttcgcgcggatataaaatcgacagtctggtgtcgggaagatgggaggattcgcccttatttgatgcgttagagatgcagggaatgtgccggttggatttggtgaataaatttttaaatatacagtgaggtcagccatatgagagaatggaatctgcgaattgaattaaaaagtgatttctgtaccgctaccggggagaatgcccccggtatgataagcagcaagactgcgctggaatacggaattccaaagattccggcaaagcgcatcaaaggctgcctgctggagtcggggagggaactggccgataacgggatgattgcgggagaacttctatcccgcatatttggttgtccggggagcttaggcggagagggaatccgtgtgggagacgggcatttgagcctcgtacctgaatatctttttaatcaggaaaaaatggaaaactttgtgatctgcgattatgagcaatttctaaagaacgttaaagattgtcaagatatagaggattcccttctggaagatatatttaccagaaaaaggacaaggacggctctggaacaaacgggaaccgcgagtgctcattcccttcgcacggtacaggtggttccctccggccttgttttttgcagccggattgagggaagcctgagtcaggaggaggaacaggcgctgcttttgtgcgcaaaaggtctgcgccatatgggaatcggtattaccagaggaatgggagaagttcgctgtacattagaagaagcggcgcttaaagagacagggattaagaaagagagtactgcgctgtttcagacaatccatccggagcaggaggttagcctgccctacgaaattaagttaaaactgccgataattctggaaggaaactccggtgaggtggcggatcagattcagggaagcgctattttaggcgcgtttgcgggaatgtacataaaaaagtatttactgggagcgaatgcgcataaagatgcggatttctgtcggatttttttgcgtgacggagttcagtttggcaatgcgtttctcaaaaaagatggaagagagtatgtaccctgccccaaagcgtttgccgttctgaaggacgataggacggtatggtttaatacaatgaaagatgaggaaaacagaagaagaaaaaatatttccgaacacatctgcctgaaagacggctgcttatataaggcggctccggacaaagagattcatttccatcatgccaggccggcagaccgggcaatcgggcatgcgcaaaatgaccgggcggaggacaaaaaaaacgctgccgggcagttctttcagtacatggccttgtcggcagagcaggtatttacgggtactttacggggaaaggcgggcgatattcaaaggctggttgagtgtctggaggaaaacggatattgcctgatgctgggcaaatccagaaccgcggaatatggaagctgtgaatttcacattacaaaaccctctgctgtggagcggaagtatggaaactctgcctgtggaaaagactggctggtctggcttataagtccgtttgtttccatgagtcaggaaagcggtctgtttgaaacggaggcaggtcctctgatgaaagaaatgagcaaagcgttgaattgctcaataaagttagagcactgtatttgcagctgcaccgttctccaggggtataacggcagatggagactgccttcggcgcctaatccggccctcgctcccgggagcgcattccatattaaaacggacagggacgtggaggcttgggaaatcgaggagaagcgctggggaatgatgaccggaaaaggctgcggacaggtgaaagctatgccctggaaggattgccagaggggaataatcgtggaaggagaaaactcaaatccggatcaaacctggaagggagacggcccgggtgaagaagatggtggattacttgcagcaattctcgaatatcagagacggcgccttgggtgggaagaggatgccgggaaagtcctgaacattatggacaagcaagggcaggaactgccatcctcgtcggatattgttctcttgattcagctgctgaagggacgggatggaaaaccgggaacttataaaaaaattaaagaagaggttgagcggatccgcggggaggaaaaaaagcagcgcattttgacctttataaaaccgtgtgagggcgagtctgtggaatttattgagcgatatttagaggcggccaagtggaaggcgaggagggaagaaaatcatgagtgatggcgtaatcagctttaacaagatatgcggccgtctctgtgtggagatgacggggcacttagcttctccgctgtctattggctccggagaagaggagcattcggactcggacgttgtctttcgggcgtccggggaaccctacataccgggtagttctctggcgggggcgctgcttgaatattcggcggccataaagggggaagaggagacaaaaaaaatgttcggaatgcccagaggcggagtgcccggcagcagggatgacagacagagcagaatttttgtctatgatgcacggatagggcaggcggaagtgggaattcgtgacggcgtgaagttaaatgaggataaaacggccagccatatgggcaaatatgagctgcagtttgttgagaggaatgccccgataaagattcggattgagatgatagagcgggaagattgttttgaaaaagcaaaatccgaaattacggggagggagaggacagaggaaattgagcaggtctgggacagagaacgtcagtggatttatctgtggctgaaaggatttgagagcggggaactgcggttgggggccagaagccgcagaggatttgggaaaatagcgattgatcacgcccggattaaggcatttgatatgaggaaaagtgattcttataaggaatggctggactgggactgggagcaggcggatgcctttgaaggagccgggagtgagacgctccggatagaagacctggaacaagcaggcggagctgagagggaacattgtctggaggttttgctccgtatttccggtacgctgttggtccgcacttatgccgtggcctttacaaggacagaggatattccggattatgggcagatgacggttggcggtcatgggaaacaggcagtgatacccggcagcagctgggccggggctttccgcagccacctggcgaagactgtgcaggagcttttgcggcagccggactggaaggaagcacagaagatattaaacccattgttcggaacatggggtgatacagagatgagaaatcaggagcttcatgcctccgggctgatatttgaggaaacggtaattgacggaggtcatggcttacctgctgccagaatcgcggtggatcggtttaccggtgggacggtgcagggagcactatatgaggaaatcccatggacaggaggagaaatcattctgccgatacggtggaggaagaatgggctaaatctgacagacgacaaaatctgcggtttgcttctctgggcggtcaaggatttgcaggcggggattctggccgtgggcggagagacctcggtgggaagagggatttttgaaccagtacacgggaaagataatctctttttagatggagctgttttgacggaggaggatcagaaacgttgtatgcaggccgcggttttgtgggtgaaagggaatcggaagaaagagaatacgaggtgatggagcaatggagaggtatgaaccgcttggaacgataaccgaacagaaggcaaaagagaagattgccgaatgttttcccgatacagcaactttgtatgcagttctggattatgccgtgtgctttggtacttataatcaaggcagattttccctgggcatagaggcgcagacagagccggcggcactggattggacttatctgcgggaactccgcgttttcgacgaggaacaggaattgcttctggttccggcagacggtaactggaccgggagaatgagacgggatataggacaatatgaggaaacgctggtggatggagaatatgtcatcgatgaacgtcagaaactctggggaaagacaaaaaagtcgtataaagtgggggacacggtctggagccttctggtgtctggccgtggaaccagaatacagataccgctggatttgaatgaacggaaggaggcggcaatccgtgtacgccgctatatgcgtattcctgacgtgaaaaaggatggagcgctggtgtttcagaacgatatccgcatgatagggctgtgtccatgggaaggagatgagtgaaatggcgggaaaatttgtagagaattataaaaaacgatttgtcaatccgtacaattttattcctttgatggaatcatgcagccgttcggtaccgactgccgaatttgaagattgctatacgggatactttgactgcagaataaaacttctgacaccgctgtttataccaaatacatcatcttcttcaagactgctgagcgaggaagaaaagagaaatgaaaagtgcaaggacgaaaagtggaaagggtatgatttctattcttatgatgactggtcatcggaggaatgggaaggaaagggtctgcctttgccgccgcaaaatcctgcgattccgggaagtgagatcagaggggctttgcggagtgtctttgaagcggcatttaacgggtgtatgtcttctgtatccgcgggtagggtgctttcacgaagaatgaataaaccaaaaaaaccgggaattttgaagaaaattaataacgaatgggtgattataccatgcaagcgggcgatgctttttattgggaataaagaaagtacaattccggatgaaaagatgggtattgcagttgggagatataggtataatcattggaaggaagggcaggagatatgggttaaatttggaaacgatcagtttacaaaagagacacgtaaaggcagtatcaaaatagcagaagtggtaaatcagtatgaagtaattgagaacagcagcctaactcattataatagagcgaaagaggagcggagaagggaactgagaaagaaaggatatgtgaaaagctggcttcataaaggtgagcggtttgctcataaacaccatgaatcagttttttatgactgcaatgaatcagaggaagctcttataagagtgaatcattctttggatattgacagcctaaaaataatattggagcaataccgtgatttggggaaaaaccgcaatattggcagagatggcaaatggtatgacggctatgaggtatttgagaggggaactcttgtgtattatagtgaggtggaggatcacgtttacctgtctccggcctgcctgggaagggaagtatttacaaagacggttggggctttattaaaagaaaacggtggttacgatccatgtgcggatgagaaactttgccctgcgtgccaggtatttggaatggtggggaaatccgggaagggcaagacctatgcacgcgcctcaaaagttagggtgacggacgctgtgctgattgatccggcaagagacggcggggcattgtttgaagaaccggtggttcttccggaattggggagccaaagccgggaacggtggagttttatacggaaccgccttatgggccatcagagaagtggaaaaagggacagggattctggacgtatgattataaatataaagttcagaataataagaacccccaaaatatgcggattttaagcgtcagggagccaaaactgcggggaagaaaatattattggcacagtcaagtggatttggaacaatatagggggaatcagctctctgcaatgaaacagagaatccgccctatgaaagcggtgggacgggacgaggagccgttgtttcgtttccgcgtgtattttgaacgccttaacagaacgcagttgaatcagctgaaatgggcgattgattttggaaatcctgcctgtgcccataagatcggcagagcgaagccgctgggattcggcagtgtccggctgagcatcgacaacttgtatctgcgcgaaattgacaaaggtacgggaatctgggaaatgaaaagagagacgaatatagaaaactttttttcacatccggtcgaggcgagcgaggcccttaagatagtacagaagatggctaactgggaagaacggccttggaatgttcaatatccatccgtggatccgggatcccatagaaccccgtataagaaaaacgagacagcatcccatcagtggtttaaagaaaataaaaaggatggttatttcatgaaagtgctcccgaaggcggatgaagatgcaaggaaaaacctggagagcgaaaaagcattatatacttatacaaggaacaaaaattaacctcctgtgcggtaaaaagcctttagatcgacttaggaaatgaaggaggtggcaagaatcacataggattcacaggattgaaagagggctgatgttatgggaggaaaagaggcattacggggatttttatatcaaggatttgcttccgtccttgaggctttatgccacgagggctgggataggatttatattgagttagattctaaaaatgataaggtcgacattgcgttagaggcaaatcacgtaatcgttaaaagcattcaagttaagtcaacaatcaatatctttaagaagattgaaagttttcctcccaacgaaataaaatcggaggaggaagcggaaatctgtttatcattgacggatcattttaaagaccgtaagcttaaagaacaccttgattggaatcgggatatttatgaaaaattagaatcgtttttacggaccaatacggataagaaacgtgcctaccaattactttggagtacacattgcagcattgcttttgctgccggcagaatcctgaacagtaaggaggggattaatatcttcccggtccaaaaaacagctactcatggaacagaactgtgggatgtgaagctctcaccgggaagggagtatccgaagtggaaaatttcagattcaggtcctgttgaaaataagtatgatacagcgttaatattaaatgttactcgaaacatacacaatgacgtgataaattatgtcgaggagagtaacatacctgttggacggttgattgactgcacgctggaggaaaatggcgccaccaatttttcggtacaggatggtacacacgcctccctcctggctaattcgatttatgatgcgattggaggaaggaatatggcggagcgtcgggcagtgttgcatatttttgctgctgcaccaaatgcattgatgtttttcttgggtcaaaattcgatgggatttggaaaatgtattttatatgaatatgattttgagaagaggagtagctgtacttattcgccatcattcgactttacaaattaataggtgcggcgatatcacgatatctgggaaaaggcggattttgcggtgactggaaaagaatatccgaatcacttgattttagagaggtaaatttgtcgctttttagaaatgtttaaaaatttgtgggtaggacttgaggagcaaaaacttcaagtcctgcttttcaggctctttgtcaatagttggggtgggatttgttaaaatcccgccccaattctatgaaaagggccctttttatgtttagttccaggttttactgattttgggcatgccaaataagcctccgcattaccgacctttttatcctatgatgtacagtgaagtatccgggttcggaaccgtttgaaattccggattccgtagctgctccgttttaatacctttatcttgttgttaaatccttctgtgggaccatttgtcagcccgtatttaaaggcattcaggatttcttttcgccaggccctgtaggtcttagcacaggcctcaaattccttgatcccacagctctgtgcattcgcaatccagtcatcaaattccctctgctgctgacgatacgcttccatctggcagatatcatagaaccactctttcatgcggtgtgccagacgcagatcctcgctatagtgaagcattaaatcacaggcctgtttgttttcatccttcagctttttatagcgggtcagaatgagtttccggctgcgtttataatacttacgcagagaaaccggcatggaccgctgcagccgtttgcgtacattttcaatcgcccatgtcacctgccggatgaaatgatatttatccacgatgattatagcgtttggaaagaaggtctgtgcaggttcggtgtatgggcgccacatatcgcagacgaagaactttaccttcaggcgttctttcctgggaatgttccgccaataatcagccagatggctttgggtccgatccgggagaatgtcgaggatccggcgctttttcggttcaaccagaatgcactgatatttaccggtagaagcattgcctttgaattcgtcaatggaaagcgcttgtggaagctggtcaggcgcaggattacttgatttcccagtaagggaatgtcctggacttttgtaaacggtaatcatgaatccgttttgttttagccccacagcagggacaagtctgttctaccggttgggactggatgaaaattttaatgaaagagtctgcctgaaccacttttttaatagaaacaccttccaagttaaggaaagccttggtttaattagggtacatctataaggggtcatctccataacattaaactttggtcgggataatgcgttaggaggcttcttatagatgtattttattacaacgaaaagaatgatggaagtgtgcttttcagcaccccccaacatatagtatagaacctcccggcgctgtttttcctggtagcggcagtaaaagggggaatcggcggcggagatgtgaaactggcggcagcttgcggccttgtgctggggctgccgggcgccttgatggaatgccaaatgcagaagtgtatgtgtttgaggaatacggggaaatccagggttttgtcggaatggatgcagaatacattgccggattatttgtagtggaaggacatcaggggcatgggactggtcatcaactgatatcagaggtaaagaggaaaaatcgcctgtcgctgcatgcttatgaaaagaatgcaggcgcggtggcattttatcaggcagaaggattccatattgaaaacagtatgacagagaaagagactggggaacaggagtaccggatggtgtttcatgagagcgatgaatcaaaagaatcctgcagtaaatgataaagaagtcagaaagggggcggtttgaagatgctgattaattttaaggacatggaaatgcgggaagtgccaggggggaagtgtatgcgcaggtgatgaagagttagctccttttttgcctgtaatagataattgcagaataactgaaaaaggtagaacgttcaaaagccgctgtcagaaaaatagagccggcaggaaacgtgcactggggacgtatggtgacaggggagacatttataactgatgaaggacggcagaagattaatgataaatttgcgccttttacggtagatatggaaactgcaagtatagcccatgtatacaatgtaaacaggataccatttatttcaattcgttgcattactgacaccgatgcctgcaggggaatgtgtaattttgaagaaaactgcgccaaagcctcaagggttgcaaagaatattacagtggatttattaaacgaacttagaggataaaatcagaaattgttctgttggtgaggaaactaaattaggtggataacgggaacttatgaggaggatatggaacagtatgaatagatagatgtgcaatgattgacagcgcaggtttcgtgggcgtaagacagataatagatatactgacagtggaaccgatttttgatatgcttgtggatcaggaaaagaataatgaaagaggtatatggaaatagaagtatttcgtaatttgcaaaataaatacggtatgcctgatctaaatgatttaacatttgctaatacagaacaaaagtgtattaaatacgatttcagaaaagaatttggaatatgtggaaaaaaaccttatctggaaaatgaatgtcaaattctcagataagggttttttgaaaaattgcttttaaactcttttcaatccacaagtggtatattgctacttgacattataaataatagcatagttaaagagcaaaatcaaattttactttaaataaatacactcgagttaaaaagaatataaaataagccaaagcgcttgaaagcctgttaccaatagagtataataaaaaatataagttaacagtaaatttcttgaactgcaaaggggggattaaagattattgcacatagaaaagagtccgatggaaaggagcaggattgggataaacacagttccaatgtggcaatcttatgcttcctgacggctgaaaagctgggactgggtaaactggcaaaattaatggggctgctgcatgattttgggaagggaactgcagatttccagaactatcttcgtggagcaggcagcaggcatcataatcacgctggattgggtgcgctttatgttcatcggcattggtggcagagggaggcagcgaaggagagaagacagactgctcagctgatttctttatgtatttacgggcatcatgccggtttgccggactgcctgactgcttcgggaagatcgccctatttagacggcctgcgggaacagccggagaattactacatagaagcaatggaaaatttttacacggaagtggcatccgcagagaaactggacaagttgtttgatgatgcgtgtaaggagttgaaggaatttggactggacagccattctttcaactggggaatgcttgccagacttttgctgagtattcttgtcgatgcggacagatgggattctgcgtgctttgaatatgatgaagacccatttgaaatggcacaggaagctcagcctgattgggaaaaacttcttataaaacttgaagcttatgtggaaaaattccccagagaaggagaattggccacaattcggcgcaatatatcagcatggtgcagagctgcgggagaatatggaccggagatctataccttgtcggttcccactggaggcggtaagacgttttcgagtctgaggttcgcgctctcccaggctgagaagtataggcagcgaaggattttttacctcattcccatgaatacaatcttggaccaaaattcaagagatattcgggacgcgctttccgactatccgtcgattttggagtttcattctaatgttattccggagaatgaagcggaggaggagaactatcgcaggctgacagaacgtttcgatagtgatattattttgactagtctggttcagtttttggatacattttttcagaagggaaacggcaaggcgaggagaatgtaccgatttgcaaactccgttctgattttcgatgaagtccaggctcttccgaagaaatgccgggagctttttaagctgacgcttcaattccttgtacgtttttgtaactgcacggtgctgctttgtacggcgacgcagccgaatcttggattagaggcaaaggaacttgtaccggatgtggatgcgctatatcaaaaattaaagcgggtgacatatatttcagagatgggaccacgtaaatatcaggaggctgccgatgatattgcgggatttatcgggaagaaaacttctgtgctgatgattgtaaatacgaaggatgctgcctggaatatcttccaggggatttctgaacagttggagacattaaattacaggcaggtacaaatacgacaagatcttacggacgaggaactggaaaaatgtgccggaggctgtgcggaagatgagattttgtgtgtgcatttgagtacacttatgtgtccgatgcaccggaaagagatactgcgctggatcaaggtctggctgtcaaagaaaaagctggtctgctgcgtttccacagccttaatcgaggcgggaatcaacgttagttttccaactgtaattcgcagcttagcaggtattccaagcctgattcaggcagcagggcgctgtaaccgcaattgtgaagcggatatgggaaacgtatacttatggaatcttgcagaggagaggctgagccgtttgccggatatacagaagggcaaggaaatcagcatgagcctacttagcaatgtggaaaatccggatgaactgggaaatccggagatgataaaaagatactttgcgaaagaggagatatatacacaggaagttgaaaaatatcaatacaaagagtggaactcggatttggttaccatgctgtcaaccaaccgtgagtgccggtgcacagccgggaatttgcgggatgagaataatccgctgcccgatttaagtaagcggttttatcagagttttcgaacggcaggcacggtttttcaggttatagaccagaaaacgaaaagcgtaatcgttccctatggcaaaggaaaggaattgatagaaagattgggggctcgccatacgctcagcgaggagatcagacttttaaaagaggctcaacagtacagcgtaaatttatttgaacatatttttaatcgtctggccggggaggacgctttagtctctctgggtgagacaggagcagttattttaaaggacgaatactatgatccgtgggctggagttacgattacgccgcaggaaatgaaggagctcataatgtaaaggagggatgccgtattgaaaatcagaaatcagattgagtattgcgtgtcaggaaactatgcactgttcagcgatccgattgcaagaatgggaggagaaaagttcagctatatgcttccgacctatcaggcgctgaaaggaattacggagagtatctattggaaaccgtcgatcatatgggttgtggatgagatgaggattatgaaaccaatccgcacagagtccaaaaatatccggccaatcagctatgtcgcgccgaagaatacattgtcggtctatacctatctggcagatgtatcctaccaggtcagggcacattttatttttaatgagaaccggcgggaagagctggaacaggattttaatgaaaacaagcaccacaatattgcgaaacgtatggtggagaagggtggacgcagagatattttcctggggacgagggagtgccagggatatgtggagtcctgtgtatttggcgagggagaaagctattatgaccattatggagaactggaatttggactcatgtttcatgggtttgattatccggatgagactgggcagaatatcctggctgccagattctggaagccgaaaatggtaaatggagtggttcagttccttcctcctgaagagttaccggaagagatgaagcggaatatccgtccaatgaaagcgaagcaatttggagaaaagttcggtaacttcagcggtttgaaggaggagacactgcagcgggagttggtctgggaaggaggggaaacgaatgagttggatgcagaaattatgcgaggcgtatgatgccggtattgtttgtgatcagtcgaaagaatcggttcggcttgttccgctggggtttgtgcgtaaaaaagtaaaataccatgtggtactctcgcgggacggtcagttcgtatctgcagacgagctgatggatgaaaatcaatttctggaaattccaagtacgccgcaggcagagagccgtacaggtgataatggaactccgtttcccctggtggaacagctcaagtatctgatttttgaagatgaaaatttgaagcggttcagccagtatatggaacagctcagggcatggtgcggacagcccgatgcgcctgactgcctgcgtgtggtatatacatatctggatggtcatacattgcttaccgatttggaatcacagccaaatttgaaagtgaaatattataagaatgcagaaaggcgggaaggcacaggagaagacgctaaggctatggtctgtttttcagtccagatgcaggatgaaagtgctgacgatctatggctcagggcagatgtcaaacagtcctgggagcggtttctggcagataaactgccgggcgccagagcgttttgctatgtggaaggtaagatgcttcctgctatggagaatcatccgaagctacagggaaatgccaagctgatttcggcgaaggattctgaatttccatttcagtacaagggacgttttgtggaagaccgcagcgcggcggtgattagctttgatgcgtctgtgcgcgcccataatgctctgatctggctcattgcacgtcaggggatgcaaaaatacggtatgacatgggtggtgtggaatacgaacggggcggtcatgaaggctccgattgatgaaaaaaacggctttatggatgatgaggaagaggaagaagactccgagccgattatcgatacatttgaaagttatgccagggaagtgagggcggcagcccgcggttatggcggcagactccacgattataataagcagcggactgattttgcggtgatactaggactggaggcggcgacggacggaagaatgtcggttacttattatcaggagtgctctggaaatgaatatgtaaagcgtttggaagaatggtatacggattgttgctggtggagctattcctggaaaaagaagacaaaggagattgcttccccgggtccggagcagattgccgttgccgttatggggcctgatgcggtaaatgtggcaaaacgggataaaaaatgtgagaagtcccatacaaaattgatgcggaaacttcactccagaatccttgtctgcattgctgacaggcagccatttccgattgatgttgtcctcagtgcattttaccgggtatgtgcgcctcttgcgtttgtcagcgggaaggaccggcagtggtccagaactgcatgggaaaccagtgttgacactgcttgtgcgatgatatcttgttttcaaaaacgcagtcgtggggagatttgcgaggtgttcccccagaactgcaggccgagtcgaaaagaagagactatctgtatggccgactttttgcagtggcggactttatggaggagaaatcgacggataaggggcgggattacccgacaaatgcgatacggctgatgtgtcagtttgtgaaacggccgtttgagacgtggcctaagatccatgaaaaactagttccctgttttaaaagccttggcgctgacagcaaacggtaccagatactttttgcgaaaattgagggacagtttacggaagaagacagatatgagagaggggagctctcgctggagtttttgcagggcttatccagtcagagacagatgctttttcaaaaatgggaacctactgaaaaaaaggaagatgggggaggcgttccatataagcttccaaggcggcgttccgaactgtacggatgtctgctggcgatagcggatgtcgcggagcaggaagccagtgagggagaacggacgggaatgaccaatgcgatgcagatgatgcaggtatttgcggcaaggccctatgagagctggggaagacttcacgacaagttgcagccatatttgcaaaaattgggcaagaaggcggattattatcagcggttgattggatttgtggagatgcagttttcacaagcagatcgggaaacggcagtgccgttagacgccggatatctgcatggatactattgtatgcggcagacgttctatcaaaagacacagttttcaagggaacctcaagagtgggaagaggcaggagacagaaggagcgccctgtatggacggcagcttggaatcgcggaccggatagagagaaggcgttttatccgtgaggcggaggatatagacagacgttctacgaatgagttgagatttatgccagtctttgcccggaagccggcagctgcgtgggaaaatctaaaagtcaagttaaagccatatctaagatttgcggaaaacctttcgggagaagacttggccaccctggaacagttggaagcgcaattacagcaaaacggctggaatacggatattcctttgggaagtgtttatctgcattattactatgaagaacgaaatagataaaacgaaatataggatgaaaaggagaaatgattatggcagctttgaaggagaaaattgattttgcactggtttttaccgctaaaaacgcaaacccgaatggggatcccctggatggaaatcgcccgagaactacatacaatgggttgggagaagtgtcagatgtttgcctgaagcgaaaacttcgcaaccggttgctggacgaagggcagaatatttttgttcagtctgatgagcgccgcagggaaggggatacgtttcgatctttaaaggatagagcagacaatgaacctgcgttggcagcgtgtgtgaaagagatgaaggcagggaagaagactcgggaggattatgccagacaggcgtgcgaaacatggtatgatgtgagagcatttggacaggtttttgcatttaaaaaagggaaaaaagaggaagaggaatcggatgccgtatcaatcggtattcgcggtcctgtcagcattcagcctgctttcagcaaaggaccggttaatattaccagctcccaaattacgaaatcggtgaatcttgagactgggaaggatccggataaaaaggggccggacaccatgggaatgaaacaccgcgtagattttggcgtttatgttacctacggtgcggtcaatgtccagcttgcggataagaccggtttcagcgaagaagatggggaggctttaaaggaggcgcttagaactttattccgtaacgatgagacttcagcccgtccggccggcagtatggaggtagtgaagctgatatggtggaaacataactgcgccagtggccagtattcatcggctaaggtgcatcggacgctgcgggtttcctgtgacgcagagggcaatgtttcggtaaatacagaggatttggagggcctggttccggaggttttggatggcgaatgatgattcggattttttgatgatttcaggattaaaacattttcagttttgccgcaggcgctgggctctggttcatattgaacagctatgggaagaaaatgcgctcacgttagagggacattatatgcatgaacgggtgcatgatgacggttttacggaaaagagaggctccgttcttttgtcccgcgggatgcctgtccgctcccaggagctgagaattaccggtgtatgtgacatggtggaattatataaggatgagggaggagtcacgattcagggaaggaatggccgttggaggctgtatcctgtagaatacaagctgggccagccggatttgcagggagcggatgcgctgcagctatgtgcacaggcgatgtgtctggaagaaatgtttgtcacggatattccggaggctgcgttgtactatggaaagataaaacgccggcagcgccttatcttaacaggggaattgcggcaaagagtgaaggagtctgtggcggagatgcataggttgatgttagatggccgcacgcccaaggcaaagatgggaaaagcctgcaaaagttgttctcttgtggaaatttgtcagcccaaactgatgaaacaggtttcggcatcggaatatatccgcagggcgttccacggggaggatgaggaatgaagaagttactgaatactttatatgtcacgacgccggatgtatatctgtcgctggacggagagaatattgtactgctgcaggaacaaagtgagctgggccgggttcctctgcataatcttgaaagtgtggtctgcttcggttacagaggcgctagtcccgcgttgatgggagcttgtgcagaaagggggatcggcctttgctttctgacgcagcatggccggttcctttccagaatttccggaccagtgagcggtaatgtgctgcttcgggagacacagtattttagagcggcagatgaaatgcagtctcttgcaattgctaaatcattcttgcttgggaaaatttataatggtcggtggagccttgagagggtgaaacgtgatcatcccatgcggattgagcaagagaagatcaatagtgccataactcagatgtgcagttctctgagtgatttggagaaaggcaaaaaccggagtgaactgatgggaattgaagggattgctgcgaaagcatatttcggagtcttttcgcagatgattctgcggaatgaggatgtatttatttttgatggcagaacccgtcgtccgccgctggatccggtgaatgcgatgctctccttttcgtacactttgctgggaaacgagattgcaggtgctctggaaacggtcgggttagatccggcggtaggattcctccatacagtgcgtccggggcgtgcgtccttagcacttgatttgcttgaagaattgcgggcgccgttggcagatcgatttgtaattacgcagatcaatctcggcatttttacggaaaaagattttcaaaggaaagagaatggtgctgtttttatgacagatgatgcgagaaaaaccttcctgtcggcctggcaaaaacgcaagcaggagacgatcatgcatccttacctgaaagaaaagattcaatggggtatggttgctttttcacaggccatgctcttgtccaggcatctgcggggagatttggacgcctatcccccgttcttatggaaatgaggtgatggatttgctcgttcttataacctatgatattaacattacagaagccgcaggggcccgccgtttaaggcgcgtagccaagcaatgcgtaaattatggcacacgggtacagaactctgtttttgaatgtcaggtggatgcaacgcaatatgtgaagctaaaacatcttctgatgaaagaaattgacgaagaaaaagacagtctgcgtttttactctctaggtaatcattatagcggtaaggttgagcattttggcgtgcggcgcggaatacaggtggatgaacctttaattttataaaagaaccgcagggaagatgtcttgccttatcagtgcgaacccgaagtgaacatgaattctgtgggaggttcgcacctggattttggtgtaaattggaggggattctggtttagagataaaattaaatatcatatttggatgatttgaataaaaagtaatgtaaaaaacactctaaaaccatgaatttttgcgggtcaggctcgtaagagcctgtggatcgaaacaattaaattgtcattttgataaaagttacgaacggtcaggctcgtaagagcctgtggatcgaaacttccggcattttcgcctttaatccagctttgtaggtcaggctcgtaagagcctgtggatcgaaaccatcccgtcatattgcgagttggagcagtatagtggtcaggctcgtaagagcctgtggatcgaaacaattttgttgtagtgtatccactctcttttaatggtcaggctcgtaagagcctgtggatcgaaacaaagaggcacggttgcaacgtcatagcaggataaaggtcaggctcgtaagagcctgtggatcgaaaccgcttcgatgacggccataatggctatatatttggtcaggctcgtaagagcctgtggatcgaaactcgttcatcttcgattgccatgtcatagattccggtcaggctcgtaagagcctgtggatcgaaacaatccatcggtataaattcaccggcttctgagtaggtcaagctcgtaagagcctgtggatcgaaacttctttcgtttcttttattcttttcattgggtcggtcaggctcgtaagagcctgtggatcgaaactacagatgtttcatatgctaacacaaggtcagtatggtcaggctcgtaagagcctgtggatcgaaacaaaaaataggggacgaagatgtttttaatgctgcggtcaggctcgtaagagcctgtggatcgaaacttagtaagcagtggcaatatattaaattatcgctggtcaggctcgtaagagcctgtggatcgaaacatatggtatggctctcatactggccagaaatagggtcaggctcgtaagagcctgtggatcgaaacgatattgccaaaaagtatcacgcggatggaagttggtcaggctcgtaagagcctgtggatcgaaacaattatacatttgaagaggtgttacaggaggccggtcaggctcgtaagagcctgtggatcgaaactgtctgccgagtaatccattccgcttatgtatgggtcaggctcgtaagagcctgtggatcgaaacaatccagcttgggcatggtcagacggaggcacacggtcaggctcgtaagagcctgtggatcgaaaccacacaggtatccaccaccaggtaacatccctggtcaggctcgtaagagcctgtggatcgaaacctttccgcccggactgccgggcaataaaataagcggtcaggctcgtaagagcctgtggatcgaaactacgtaccgacgctgtaacccgttcggcaactcctggtcaggctcgtaagagcctgtggatcgaaacataatggtatttgtctacttctgccccgctaatatggtcaggctcgtaagagcctgtggatcgaaaccacatccaaaaatatgtggacgcaatgaaggaaaggtcaggctcgtaagagcctgtggatcgaaacgattcgcagtccacaaaccgcgccgtggccttaatggtcaggctcgtaagagcctgtggatcgaaacctttcagttctgcatatttttctggactgttctgggtcaggctcgtaagagcctgtggatcgaaacatcaaacttaatatatggctgatttgcataaaatggtcaggctcgtaagagcctgtggatcgaaaccttgtgtatctccaaaaactcttagctaagtatcggtcaggctcgtaagagcctgtggatcgaaaccgtccagttcggcggtgcagcccgggccgaagtgggtcaggctcgtaagagcctgtggatcgaaacccttctttcggttgtcataggggacaagataataggtcaggctcgtaagagcctgtggatcgaaacaccgatagcctggctgtatgtcttagcgccggtggtcaggctcgtaagagcctgtggatcgaaacttcattcactggaaaaatagcaatcttatattggtcaggctcgtaagagcctgtggatcgaaacctgtcaaacaaccctaaatatgagccaatggtattggtcaggctcgtaagagcctgtggatcgaaacagctaaattgtcatttcagattctggctggtggtggtcaggctcgtaagagcctgtggatcgaaacgacgcgaacacgcatgttcaagtcaccggggttgaggtcaggctcgtaagagcctgtggatcgaaactaatctttgcttccgttatgatggttccgttatgggtcaggctcgtaagagcctgtggatcgaaaccatagtcacctcaaaaagaacccatattcgcacatggtcaggctcgtaagagcctgtggatcgaaactgtataatcatgtcaagtaatccatccgccatactggtcaggctcgtaagagcctgtggatcgaaacgttctttccttccttgctgtacagatacagcgtgcggtcaggctcgtaagagcctgtggatcgaaactattcgtgcttgtcaccctgtccataatcgttgctggtcaggctcgtaagagcctgtggatcgaaacaggctttgcgctatcatcttaatgtcattagcaatggtcaggctcgtaagagcctgtggatcgaaacctttgaggtattcatgtacctgcccatacagttggtcaggctcgtaagagcctgtggatcgaaacttggatgccaatagcgggggctggatttgaaccaggtcaggctcgtaagagcctgtggatcgaaactccattgtttcacggtcatacgcaaggtctttccaggtcaggctcgtaagagcctgtggatcgaaactttgatggcgttccatttttcttcaacagttgagggtcaggctcgtaagagcctgtggatcgaaacttgatatttctggttaaatggcgacttggctcttggtcaggctcgtaagagcctgtggatcgaaacttaatatcaaataaattccagtggctttttaatggtcaggctcgtaagagcctgtggatcgaaacaatctcccctgtcgcgtcgcggaagaatccggtcggtcaggctcgtaagagcctgtggatcgaaacaagttccctatttttcgcaatcatagcatcgacatggtcaggctcgtaagagcctgtggatcgaaacccttcaattctttcatcctaccacaattccagtaggtcaggctcgtaagagcctgtggatcgaaactgtctgtagctatgaaaaacaatgacgaggacgggtcaggctcgtaagagcctgtggatcgaaacacatgcttctgataaggcgtccagattgcccttggtcaggctcgtaagagcctgtggatcgaaacttgagtacattgtacaaacaagggataaatctgggtcaggctcgtatgagcctgtggatcgaaaccttttcccggacaaaaatcgtaaaccggatgaaatggtcaggctcgtatgagcctgtggatcgaaacaatattctcctgcaaaagtcttccgcaccctgcaaggtcaggctcgtaagagcctgtggattgaggttttattagcgcaaagagatgtggattccggggataagagatcggcagatgaaatctgtcagcaggaactgaagaatgctgtctgcatcacacttaaggaaaagggggctcaggaaaaggggagtcttatgaaaaatgtgatccggacgatggggtatgcccgaagcagtacttccttagtggaggctgctgaaaaggggatgaagtatggaaggaagacaggggagattgtgcaggatgaagagaagcggtttaggctgggaaattgacaatcttgctaaactgaaaagtgcagttcgctaaggaagaatgatacccggtgtcagaaaatagtttggagaaactgagtaacaacaacagcaaaaacaatcattcatagcgattaaatcaccagaagaatttacctgcacattaggaaatgattaataaattctttagcattcaataatacaataattcaaaagatttattataatgttagaggagataaaaatcatggaacgtgaagtgtataagccggattgggtatagagttaaggaggcatcatgaaaggatttaaacgacagaatcagttattttctctctgtggattgaattgtggactttgtcccatgtttttgaataaaaactgccccggctgcgggggcggtgaaggaaaccagacatgcaaaattgcaagatgcagcattgagcatgatggagtagaatactgctttcagtgcggtgaatacccttgtgaaaaatatgagcatattgacgattttgattcctttataactcaccgccaacgaaaggctgatttaaaaaaggccaagctgtcaggagtggaagcttataataaggaacaacaagagaaggtaagaatactggatattctcctgtccggctacaatgacggacggaaaaagacactcttttgtgtagctgtaaatcttttggaattacaagagctgcaagaagtactcagagagattgagaatagacctgacataaagatgctgacactcaaagaaaaaagtgcttttgttgcaggactgcttcaagatacagcatcgaatagagggattgatctgaaactgcacaaaaaaaagcggtgataggaagctctcattctttgtcagtgacaaaccgaaataaaaagggattgagaatagcaaaaatgaaaggtaaattcatatgaagtacacgtgtatgcttatatcggtagacgacattaatgccgcaagaaaattttatgaggatttgttcagattggaagtatttcaggattacggaagaaacatcgcttttacctgcggcctggcattgcagcaggattttgactggctggtgaacctgccgaaagaaaaggtattaaagaaatccaacaatgcagaaatcgtctttgaagaacaggattttgatggttttctgaataagttgaaagaatatcctgacatagaatatctgggagaagtgctcgagcatagctggggccagcgggtgattcggttttatgatttagacggacatatcatagaagttggcgaggatatgaaaatggtgataaaacgttttcttgcttccggtatgaatatggaagaaatcgctgtgaaaatggacgcttccgtggaggacttaacgaaacttttgaatcattaaaatgtccattttcctgtaaggttttcatagggatatattatacgtgggaggtgtcggagcaaatgaaacaatatattgcatttttgcgtggtatcaatataagcggcaaaaataaagtgtccatggcagagttaaaagaaggttttgaaaaacttgattttggagatgttaagacatatttgaacagcggaaatgtgattttttcaggtgacgaagatgaggatgaaacgtttacaaatcagattgaggtaatgataaaaaaacggtttggcttggatattcctgtttttgtcatagcaaaagaaaaacttgagaacatcttgtataatgcaccggactggtgggggaacggaaataatgaaatttatgacaatctcatattcattattccgccggccacattcgcagaggtatatagtgagattggagagcctagagcggaattagaaaaaataaaggaatacaaagaagtgatattttggtctttcagccgaaaagattatcaaaaaacaaattggtggtctaagacagcaagtgcagctatcagcagcaaattaacgataagaacggcaaatactgttaaaaagacagttggaatgtaatcgtttttgttataatttgcaggtaggcagaatagcagagcagaaaacaaagaggaaaaatttatgtttgcagatggtcgaagcaaaaaagttgtttttatagcacattgtatattaaatcaaaattcaatatctgacgggacagccgtttttccggcagcttttaaggaggtcataaaaattcttcttgatgctgatattggcattgttcaaatgccatgtcctgaactttgctgtttgggacttaatagaggtaataacaatggcgcagaggagcctgttgtcattgaaaatacccgcattcgtaaggaaatgcaaaaagatgaagctcacaaattattaatggcccaagttgattatgtaatgaaacagataacagaatacaatgcttatggctttgagataaccggaatcattggtgcaaatcgttcgccaaactgtggtgtggaaactacatcagattttaataaagagataagcgggaaaggggtatttatgagcgaacttagtaatagaatcaatgcgctcaatttgaatattcccatgttaggaatcaaaaacactgataacatttttaatcaactaaaatctattattaagtaaaaacaaattagaatttatcgggcggaacaacacatcatcaaagagccggatacacgaatgatgagtaaatgctatattcaatttgctgcattgtttcttcttgacttttacgctgcgtcatagtgtatgatgaagaaaaatgaaaggaattaaatatatgagaattgtttctgtccgttcagatggtgtttattcaaaaattatgaacgcaccttttgacaggaaaaatgatatctaccgttatgaactgatgaagccttttgaaaaaaagtgggcttgttacagtgtgccaatgaaagctgcagcatgtaatggctatgatgtcattatggcaagcggaatgcttggacatatggcgccaaccgctgttgatgaaaagcaaaagcataatattgaactgatttcagacaatgcgctttggaaaagatgtgaaatgtcaattcaaaactcattaaactgctttattgagcatggagtaaaattacctgttcaagagtatatgtttaccattttgcttgcaaatccagaaagcccatacactgtgttaaatgatggctattgcggagatggaggtattccgggatatatttttgtttggctaactccaaatgaatacacattaaatcatcttcatgttgctttagcacatgaaacaaaccataatgtgcggtttcaatttatcaagtggaaaaatgacattacactcggtgaaatgatggtcagtgaaggattagctgaaaactttgcaactcaaatgtatggtgaggataaagcggggccttgggttactaaaaccgatatggtaaccttaaatgagtatattaagccaatcattcacgatggtttaaatgttcaagggcttgaaaacctcaatgcctatttgtatggcgatgaaatggctgctttgcaaaattacgctcctgttggtttaccttactgcgcaggctatgcttgcggctatcatttggttaagcattatttgaacaaaacagggaaaagcattgcagaagcgactatattacctgcgagtgaaatcttagattgtgtggaggacttttggaaccaataaaatataatttggagttttacaacaagcatgcgaattccactggcggttttgaatttattttcaggccgcctttttctttttataaactaaagctccagccaaacagttcgggctttaatatcacatttctccaacataaataaaaatggtaattttgcgtatcttaggaaataattaatcatttatccattatatataaacacattagtgtcacggatccggtataatgtatatgatttaatctgaaaggagtgtcatgctttgcttgaaaaaatacttgttgttgatgatgagaaagaaattgcggatctgatcgaagtatatcttcaaaatgaaaatatggatgtatataagttttattcagggaggaagcgcttgtctgtattgggagtacagactttgacttggctatattggatattatgcttccggatatcagcggactttcgatatgtcagtccatccgaagtaaggagtacacatatccggtaatcatgcttacggctaaggatggagagaccgataaaattaccgggcttacactcggtgcagatgattatattacaaaaccgttcctgccccttgagctggtagcaagggtaaaggcccagctacgccgttacaagaaatataatgcgggctcagcggttccggcagcagatgaaatcttcaaatatgccggtttgtcgatgaacattaagacatatgaatgccggcttaatggagagacgctgtcactgacccctacggagttttccatactacgaattcttttagagcgcaagtgcagtgtcgtcagtgccgaagaattattccatgaagtctggcaggaagaatattataccaagagtaacaatacaattaccgtacacatccgccatcttcgtgagaagatgaaggataccggggaaaatcccagatatataaaaacggtttgggggttggatataaaattggggaaatttaaaaaaacaaaatataactattcaaagctcggccgtattacatttatcagaggattatggattaccatgggagcagttgctgcagtctttgccctgcggatgctgacgcgtggacacttggcagacgcgattgtcggggcagttgcacgcagtctttcaatcagtgagaaggaagctgatttgatatatttcaagatagtgacggtcaatatgcagtttattcttgcgttagtcataatcatatttgtttttttgttgttccacatgcttttggatacatataaaagatattttgatgaggtagttgcagggattgacaagcttatggaagaaagggcagcgattactttgtctccggaactggagagtgtggagtataaactggccgatgtaaagcggacacttgcagaacgggcggatgaggctaagagggcggagcagcagaagaatgatctggtggtatatctggctcatgatatcaagaccccactgacatctgtgataggatatctcagccttttagatgaaacaccggatatgcccgatgaggagaaagcaaaatatatccatactgcatgggaaaaggcgaaccggctcaggaccctggtgaatgagttttttgagattacccgcagccattcggaatctcttccgcttcataagacaaaggttgatcttttctatatgattgctcagatttcagatgagttgtatccgcagttgaatgcatgcggaaaaatcatagagaatcatgtagatgaggacatatctttatatggcgactctgataagctggccagagtgtttaataatatcctgaaaaatgccatttcttatagtgcggaaaacagcgttatcaaagtctcagccagagagctttcagaatggacggtgattcgatttgaaaatgacggggaaattccggaggataagctcaatgtgatttttgataaattctgccgtttaagcaatgcgagattaagcgagacaggaggctccggcctcggacttgctattgcaaaaaatattattgtactgcatggcggacagattggggctgaaagcagtaatggacgcactgctttcattattgaaatcccatcagcatcatcagactgtcacggcaggggctacctgtcagccaaataaccaaacaagtgctgctattttttaacaacctgttccacgataccatcaactaaatgtgtttgtatctgttctaattcttcatcttccctgaactgttccaggcaggtcaatacttgacgctgcccttaactatggctttacaagccatgcaaattttacgcgggccttcaaggaaacgtatggaatcacacccgaagagtacaggagagatttaccaatgctcaacacattcgacaagccggaagtttccatgaattacgtcttagtagatgaaggggttccgctggtggtaggaaatatcgtcttggaaatccagagaaaaacgttgacggaaccggaagtttacctcggctttgaaactaaagtccgtatttccgaacagattccggctggtgaaagcacaggtgtagatgtgccgggacagctctggaaacgctaccatatggagaagacgttaatcgcagaagacgtcgatgccaatgtggaaatgggaatgtcccatacggaagatacggcacagggccttttcacgtattttgcgggaggtcttgttcgaaatatcccgcataaacagcagggagactttgtaaagagagaactccctgcgggagaatacatcgtttgcaggattgaagcagaaagttttgaggatttggtaacggttgccttgaatcagggtggtcaaccccattccgttggaaaaaaaagagtaggagggatattgggatggattggaatatgctttatacaaacggcgatgctccatctctgatgcaaatagcggagtatattgacaatccgttatgggcagagtttgacagccgcatccggtccgcttaccggattgagccttatatggattacagccgctgttccatgcagccaggctggaatattaaatacaagaaaagcgggaaatctctttgtacctgttacccaatgcagggttattttatcgctcttgtggtgataggaagccgtgaacttacggaggcagaattattaatgccgttattttctgactatgtgcagaaagtattcagagatgcaaaaactggtaacggacagaaatggctgatgttagaagtacgggataaggagattatgaataatgttattgaactgattaatcttagaaagaggagtatatcgccttaggaatttcttaatcattcatttaccattccatagaaaatcaattatctcaaattaaaaaattgcctgctcatcaatggtatgcttaaactgcctgatagagcaggcaatttttatatgaaaggaggtaattttagagtatggaggtggctgtgagaaagaagttaagacggatttttacaataatgggaacaacagcactgatttttactataacagcctgcgggaaccgcatggatgccatgcagccggattcttcctatgttgcagacttttttgatattccggactcagtgacaggaatcgaaagacttctgctcaaagatgatatggcctatatgtgttgtctggaggaagatggcacgtcctatctgtcatcaatgaacattgatgacggtaaatttttgaaacagaatctggagctggacgcctcggtttcgcttctggattttggctttgccccggacaacagtatctgggcggtttgcctggaacaggccggcgtctatagtttaaggaaatttgacaacagcggttcactggttcagtcggttgacctggcaggtgtgatggacacctcagtcatatcggcagttggaagagatttgttcctcagcattgatagagagggaaatatcggtgtggctgctaaaggcagaaatacgctggtctatctgttcgacaataacggcaatttcttattttctctcgactatgagggaaatcttatgacaaccacaacgactgccgggggacagattggtatttgtgcaacttccccggaccgtatgaactatgacctgctgacagtggacatgaagagccgggattggagtaaagataaaatctacctgggcgcaacagcagggctgtacggaggagtgaacaaagatttctatcggtttgattcttcggttttatatggttatgcagcgggcgcgcaggagggcagcccggtctttaactggtcggatatgggacttggcacatcagaggttcatcttggagaatgcacggacgggcgttttgtggtcctggcagcctcatctaatcagactgaggtattatcgtatgaaatggcggttctgaccaagggggcggatgagagggagattttgagtatggtgagcctgagcgcgacccccggccttgtccaggccgtatctgattttaacaaaacaaacgacaggtataaggttgagctgacagagtattttccgtatgcgcagaatgtgactgacgaggaatgggataatgccattataaatcttaatacacgtatcatctccggcgatatgccggatatcctggatatgagtcatttgtctgtacagatttatcaaagcaaagggcttttagaagatctgtatccatatatggaacatgatccggaaatcaggaaagaggattactttgaaaatgtctttgaagctatcagcctggatggaaagctgccctatcttacggacggagcagccatatccactatgctggccggtgaagatattgtggctggaaacgatggctggaccattcaggagctggaaaaggtccttgatacttacggagccaattccataaacaatctgtctggtgcttccttcctgaaaatcatgcttcagacagatggcagttttattgactgggatttgggcaaatgctcttttgattcacctgaatttgtaaaaatgctggaatttgccggcaaaatacaggaaagcagccagaacagctttggaggaacggagatgagcgaaagctatgcagcagcctatgagactgtgctgagcgtttaccacatcacccggtacagaaattactacaacgggaacctgagatttcttggacttcccggaggcggcggtgagtaccacgtaatcaaaccggaagtgaaggttggaatctcctcgtccggctcccagaaggaaggggcatgggaatttgtcagaacactattgacagaggagcatcagatgtcatgtatgatgcttccgattcataagagggcgtttgataaggtcacgcaggcggcggtggagggaaaatctgtctggacatggatttacgaagacggcaaggcaacaaatgaagatgtggagctgacaaagcagcttttaaacagcgcagcctatgtggagaatgacaatcagacactggaatcactgatattggaggaggcccgggaatatttttcaggggccaggagcgccctggaagcggctgaaagaattcagagccgggccagtctttatatcaatgaacaaatgtaaaaattttatatgcaaaggaaaggatccaaaactatgaaaagacagcttatgaaaagaggaatgatggggatatatgcagctatctgcgcggggatgcttttggttaccggctgtgcaggtacagagacaaatacaaaaacggaaacagaaagaattgaagcgacagagagacaggaaagtaaccctgtaattactgccggtaaggaggagatggatacctttgcagatgcgaatgacatgatgaagtctgctgatttgagcggtacagccggcgaatgctcggataccgggtgcgtgattaatacatcgccctttgcggacggcacttcatcttcaggagatgggggcagcatgacggttacttatacagaagacacagtatttcaaaagggaaccgtgaaatcggatggcagcagctactctttggaggacagtgaaaaagacaggataggggacagtgattttgtactgtgtttcgggaaacagcaggcggacggttcttacctggcagacagaatcattatgattgtgttcaattaacctgataggagatgatacagctatgcgtttacatattggggaaaaaataagagaacaaaaggccatgctcatttccggaaagaaatacaggcccctcatagaagaccgtgtgcagcgcatggctgtatatcttatgattggattttttacattcatgttagtatgcacaattatttcccgtgtatcgtattcctttactaccgcccatgtttcggtagcttcgatggcaggcaaaacgctgatgaacagggctgaattggaggggattatctatgcgtcatcggagaaagggattagtcttccggatggccttaaggccgtttccgtcaatgcagggaagggcaaatcagtagaaaaaggcgaagcgctgatagaatttgatgtccctgccgcagaagaacggattaaaaaactggaagaagaaatccgtatccttaattttaaattggatatttcatcaaacaatggcggcaatgatgtgattgaggcacagcgtacgctggaggatgccaaaaaggcgtatgagcggattgctgcgaagtatgccagggcagagatgcggctgaaagaagattatacaaagcttgaagaaacactggcggatgcggaaaagaatcttattaataaggcagaagcgcttgtgaaggaagcgagggaaaacctgcaaaatgtaagggaggacgcggaggacgccatccgtgccgcagaacaggcgctggatgaggaatcagaaaatcttgatgattcagaggatagttatcagcaggcattagaagcgtatgagcaggcgaaagatgaacttaatatggcaaatcagagagtcagcgaaataaaggaagcgattgcagggaagcagccggatgatgccacggattatacggaggagctgaaggaggcggaggaggaactttccattgcgcaaaaggcatttaaccaggccaaaaaggaactttcaaaagcagactataactcatcgtcctatgacagggcagacgataacctggattccatcaagcgaggctggaaacgtaaaattgataaagccaaagatgctctttataaagcagagacagtgctggaagcagtcagggaaggaaaagatttttcaactgagtctgcagtcagtgaggcccaggctgccattgatactgcaagagaagcgttaaaccgtgcccggcgtgagtcagaggataaccaatattctgaggaggaagaacattatgctgcgggaagggcagttgagaccgcgcaggcagcattggaagatgcccggagacaggctgaggtattgcagaaggaaggtgagattgacagaattgcctgtgaatctgagcggtcagataaagagaaatcgcgtgctgcattacaggaaattctggataatgggggacgccttttggctccggcccctggaacggtggtgaggacgctggaacgcggggataaaacaaaggagggggaagatgcagtcattctttcctctgctgacagaggatttgtttttgaaggaaaactggataaagattcagcgcgccgcttttcagccggggacaaaggagagcttcattacaaattggatggaagcacacaaaaagcagatgtggagattcattccatcagcacgccggacgagtcggaccaggtttttgtaactgcggttctgccggagggaggttatacttccggtatgccggcacagctttttctgagcagaaagagcgagacgtatcaaaattgtctgccccttaccgcactcagaagtgattccggcggagaccacgtattcgtactccgcagacaaagctccgtactgggaacagaatgggtcattgcaagggtagatataacagtaaaggaaagagacagtcagatgatgtatgttgacggcgcgcttacgtattcggatcaggtagttataagctcaaataagatcatatcggaaggagacagggtccgcattgaaaattaacaggtttgctcattaccgggcgttgataatatcagcaatactggcagcagttctttggagtttcgcttgttctttctatagtacggccatcagtcactgcaccagtgttggaattaaatgggaaaagggcggtgtcagcccctcagagcttatcaggcagcagacgtatgcaaggcaggatggagcaggaaaccagccgaaggtcaccttatggcagatatatccggaacaggagataatggcttcagataaaaaggagatgaaggcggatatagttgccgcctttggagactgcggggatgttgtctcctccatgctggctgacggagcttatccggccagatcggatgcctctggctgtgccgtcagtaccggtctggcattctccctgtgggggagtattaatgtgattgggttgccggtaaaggcggaaggaaagcggttctatgtccgcggcatatttgaggaggaagaaccaaggttattcttacaggcgcaggcggaatcgaaagaacccttatccaatatgcagctgacgtttacaggtccgggagcaggggagagggccggtcagtatctctcatcggcaggttttccggagggacggatccttgacctgacattatttgcatgggtacttggcatgatactccggctccctgcgatcattctggcaattggtatccttgggcgcgtgaccaggcatgggaaaaggctttgccgttatcccctactgctggctgtttattttttaatcgctttcggtatattggccgtattatggttttgtatggatctgcctgagtttccttccgagtttgtccccacaatgtggtctgattttgagttctggggaaatctgtttcaggagcaggggaaaaatatggtctcctggatggcggccgggcctgccttccgggatatggagctttggacctcgtcatttatggcagtgctgctttctgtgtgtgcctctgcctttacggcagccgcagcaatgctggtatccatacgctcttacaaaagaatgatgttctattgtgcggcatatacactgacactttgcctgatttcattcaagatagcctctgctcacaatatgaccttttgcaaagcgatgtatcttctgccatgtctttggatatgtgtggattttctcttttactgtctgaaagaaacacttgccgccgatgtccgtgaagggaggattatggatgaagaaaaaacgtgaatacagtgttccgatccgggaacaaatggtaccatggctgtttttgctgccgagcctgctgttcgtgagcattatggtgctgattcctatgctggacgctctgcgccgttcctttttcctggctgccggtgaccggtttgtgggatttcaaaattatctgtcagtcttgaggaaccatgcgtttcagctggcggcagctaatacagccaaatttatcttagtctgcataccgcttctgttactcttttccctggctgtttccctgatgctggcctccttcagggaaaagcgcggcattttcaagacctcgtttcttgtacccatggcggttcccgttgcttcgattgttcttttgtggcgtgtgatttttcataaaaatggacttctcaatgcatttactgcactttggggtttggttccggttgactggattggaagtaaggccgcctttggcgtgttggtgtttgcttatctgtggaagaatttcggatatgatatggtgctgtggctgtcaggactcagcgccataaatccggcattatatgaggcggctcagatagacggcgccggaagcctccagcggtttgtgaggattacgcttcccaatcttatgcccacattatttaccattaccgtgctgtcgctgctcaattcctttaaggtgttcagggaggcttatctgattgcgggaggttatccggatgacagtatttacatgcttcagcacttattcaataactggtacggcaatctggatgtggataaaatgtgtgccggagctgtgatgatggcaattctggtatttattttaatactactgctgcaaaaaattatgaacagaggagataggatatgaaaaaatggcttcttggcttgccccttgtattgatttcggtctttatagggctgcctctttggatgctgatatccggtacctttatgggaggggcagagctgtctgaaaatcttgcgcctgtcctggagggcaggggaggaacggctgtatggcctgtaatggcgcgttatccgactctggcggcatatgtggaactattattggatacgccccagttttttacagtattctggaattcctgcaggcaggtttttccaatcatactcggccatgtccttttgggcgcacctgcggcatgggcatttgcaaagtttcattttcgcgggaaaaagatactctataccttgtatattgtcctgatgctgatgccatttcaggtgaccatggtttccagctatcttgttttgaacaaactgggcctgattgataccgtgtgggcagtcatactgcccggtgcggcatcaacgcttccggtattcatcatgacacgttttttcatggacataccggaggcggtcatggaggcggcagccgtggatggggcttcctcatttcagacttttttacgatttgggcttccgctgggagcgccgggcattctctcagctgtggtattgggcttcttggaatactggaacgcaatagaagcgcctcaggcattcttaaaaaaccaggcgctctggccgctgtcattatatatgtcaaacatcacggcggataacgccggggtatcattaattgcgtcactgattacactgatgcctcctcttttgatattcctgtccgggcagaaatatctggagcagggcattatatcttccggaatgaaagattaacacaggggattaatatatggaaaacaggaattttgcaggcgatctgcagataagcaaagtgaataaatggtatccgggcgatgttcatgctgttaaggatatggatatggaaataaagagaggggaatttatagtatttgtaggcccttccggctgcggaaagacaacgctgctgcgcatgattgcaggacttgagagtataagcagcggcgaggtcattatggacggcaggactgtgaaccaggttccgccaaagaaccgcgatattgccatggtattccaaaattacgccctttatcccaatatgaaagtaaaagataatattgcttttccccttaaaatgcagcatatcggcaaaacggaaagggagaaaagggtagcagaagtggcgcaaaagctggagctggatgctctgcttgaaaggaaaccgggggccttgtccggcggccagcgccagcgtgttgcccttgcgcgggccatgataagaaaacccggactgtttctcatggatgagccgttagccaatctcgatgcgaagctccgcacagaaatgcgccgggagattataacgctccaacgggagctgggggtaacaaccatatatgtcacccatgatcagacggaggcaatgacgatggggacgcgcatcgccgtaataagcggcggtgttttacagcaatttggaacaccgcaggaaatatatagaaatccggcgaatctgtttgttgctgggttcataggctcacccaatatgaatgtgtgggacacagagcttatttcaaataacggacaacattatctgaccctgggaaatgcccgtattccgatgggtaaaagcggtctggccgcaagaggactgcaggggcccattaaggcaggtatccgtccggaacacattgtgccggcggcaccggacgatcctcatgcagtgcggatgaaaatcagcattttagaaaataccgggcgtgaagcggcagttttcctcaccggggctgatataccggatattacaatggtaacaggcgcggatttctcaggccgggccgggcaggaggtatatattcggctaaagccggaaaagatacttctatttaatacagagacaggatgtgcatatggagatgtttatgtatagaatatattcaacagggatagaaactgcggctgcatcagcgatactgataccgattctttttttatatcaaatatttatatttcataacataaaaaagacggcggcctatattatttttatattatatttgactgcaatgtgcctgttggtgggggttccctgtgtgacaggaattaaaatcggttggtcttataattttattcctttgtatggtatgctgaacgatataactaacagctatctgaatgttttgctttttatcccattaggtatatttgttccatgcttatggcccgaatacagaagcatgatgaaaacagtgggcttgggcctgatgacatcactgggtattgaaatactgcagatatttaccttccgcgcaaccgatataaatgacctgataacgaacgcggcaggtacattggctggttatctgattggcagagtgatgataaaaatgattcctcaattagatagactgaattgcaggagaagtgagttatatctcctatacggaacggttggtgcagtgatgtttttctttcagccatttatttttttattatcagaggccttatatccgtaaaggctggcatccattcctttcttttgttatgaggaacgagtgtgcttttatcagcccccgccttcaaccccatgaaatcgcagaaaattccgtgccgcatgggacagcgggtactctttattgacaatgaaagcgctcgtgataaacagattttcatcggaaaaatgcttcacggttaagtccctgatatgttggaagtctgcggccgtcagtgaggccagtgcgacggttttaaaggatctggcccactcaatcgcagttgcattcgaagaggtaataatagaaatattcggcgcgagcagatggtggccaaaggaggaacggaccagatccaggcagtcgaagggaaccgcaagcggatagtctgccagcagggatatgtcgataatgctgccgctttgcatcagagggtgttccggcctgcagattgccacaatctcttctttctcatagggatagacagccagggaagcatagccgggaaggctggaccgtatgagcccgatctccgttacatggttcaggacgttcggaatcgcaaaatcacttggtatttcataaaaatcaaaattgacattcgggtatgcggcccggaaatcgtcaaacagatggtgcagaaaataggcggagtttcctgccgggattgagagctttaaaagctcggaaaaacctgtttttttattgtgaatctcgtcttgaagtttttcttcggcctggcagatctccttggcgcgcagataaaaaacgcgtccggcgtcggtcagctcaagcctgtgccggtttcggattaaaagctttgccccataataagtttcaatatttttcaactggttgctcagagaaggctgggcgatcagcagcttgttcgacgcagccagaatacttccgctttctacaatcgcaacaaaattccgataagactctaatgtcatagagcaattccccttaatttataatttaatattcttctaatataagaaaaatattataaataatatgtaataatgatagttttattatataaaaaattatgttacaatgcaaattgtttttaaaaaatagtgcttataaaaagagagctatatataagcacaactaatgaataaagataagggggaataaagagtacgatgaatgctttactgacagatttattggccgtatttggagttgttttaaatgcgctgcctcagggacttttagcgctgtcctttggttttgcagccgtcccgacggcgatggcgttttttatcggagcgtttggaaatgtgattacggggaatgtggcgccgatttcatttcaggctgaaactattacatatgcgggtaccagcggcaggaaccgctcggagcggtgtacaatgatctttatcggagccgccattcttgcggttatcggagcctgcgggatgctgactaagattgtggattttatcggtacagacattgcaaacggcatgatggccggtgtgggactgatattgacgaatgcggctgtcaacatggtgaaggaggatcaccttgcaggcggagtatctatagctgcggcagtgctcacctattttctgaccagctccagtcccaatacgctggtttacacgatcgtgatatcggtcattgcgtccagcgtggtatcggcggttttgaataaagaaaagaaaaatatcgttgttgcagatgacaaatttacccgtcagaaattcacatttaacggaaatgtgatactcggcgctctcggaatggtctgtttaaatattggctctaatatttcatttggagcaatcacggccagcatggcaggagccgatacctttaatgtggaccacctgaccctgatttcttcccttgcggatatgggttcctctttcttcggaggcgcaccggtggaatcgataatttctgctacggcaaatgcgccccacccggtttgggccggagtggcgatgatgattgtggtaggcataattttgttaagcggcctgcttccgaaaatcggcaattatgttccgtcctcatcgattgcgggtttcctgatcgtactggggcttttcaagacctttatacttgatgcacccgtagcgctggcaattaatccggcggtaggcggaactgcactcgttgtcacggcaatttcgaatccgtttctcggaatgcttgccggtatcgcagccagagtcctgggcctgtaaggaggagtagcattatggatacatatgaattaaagctttgcggcgtaaagcgagaactgccgtttatcgatttggaggataatctggcctttgccagttttgtaattatgggcgatacggagcttatcacggcctgcgcgccggagctggcggagaagattggggacgtggatgtcattattaccgcggaggccaaggggattgcccttgcctacgaaatcagcaggctgctcgggaaaaaggaatttattgtggcaagaaagagcatcaaatcctatatgtgcggcgtggtatcggtatcggtgcattccatcacgacctccggggagcagcatctgtacctggacggccatgatgcaaagcgtctttgcggcaaaagggtctgcatcgtggacgatgtgatttcaaccggtgagtccctctatgcgttagaagctctggtggagagtgcaaaggggatcgttacaagaaaagcagcggtgcttgcagagggaaaagcagcagagagagacgacattatctttttacagaagctcccgctgtttcacaaatgtgatgataacagctatgaaattaaggaatcataaagtcataagaagtttcattaaataaacaaagaagataaggcagatacctcgcatctccaccaggaatgaaaggtatctgcctttataaatgattactcttgtaagtaaacagatactgtcccgggcgcacgcaccggtcttcgcttcttgtaatttaagaaaaatttaggaatttcaagtacatttcgacatgatgatatatgatagagtataataaagaattaagagtaaaaggtaaagctatttgaatttatatgaatcaaatttgggaggatgaccgtcgacatgcgtattttgattgccgaagatgaagttgaacttgcgaaaggcctgaagttccttctggagaagaacaagttttccgttgatactgtcaataacggagcggatgcactggactactttcacagcacggattacgatgtgatcgtgctggatatcatgatgcccaaaaagaacggaatggaggtgttatctcagataaggagtgagggagcggcagttcccgtgctgatgctcacagccaggtccgagattgaagacagggtcgccggactggaggcaggggcagacgattatctccccaagccgtttgccaccagggaatttattgcaagagtgaaggcgcttgcccgcagaaatgccggatatgccgatacggttctgtcactggggaatgtacggctcgactgtaaccgctatgagctttcctgcaaagaggaaacggtgcggcttaataacaaggaataccaactgatggagctgtttttccagcatccgcattttgtattctctaccgatcacctgatggacaaggtatgggggaaggactcggaggcggatattgacgttgtctggacatacatcgggttcatcaggaaaaagctgaaacatatcggtgcggatattgaaataaaaacagtgcgcggagccggttattcgctggagggcaataaatgctgaagaagatgaaacgccggtttattgcatcggcgatggtggcctttggagccgttatgctggttttggtaacggttattaatattgctaactgttatctgacgactaaaaaacaggataacctgctgaatatcattctcgaatatgataaaaagacattttcgcagcccggtaccggttttccgccaatttcggatatgccctgggcagggggcccggaggcagagttcatgacccgctttttcattgtccgctgcgacagtgataataatgtgacggtaatatccagagcgtatatctcttcggtcgatgaggagacagcgcggaattatacggaggaaatcctggctaaaggaaaggtaaaaggttactttaaagattaccgctactgtgtaagccgggaggagggagaaataatcctcgtttttctgaacgcatccaacgccctgcagtttatggagtcgttactgattgtatcggttggcataggcattgtcagcctgctggttgtcttcctgcttgtcatgattttatcccaccgggcaatacagccttatgtgaagaatatagagcgtcagaagcggtttatcacggatgccggacatgagctgaaaacaccgctgacctccattgcaaccagtgcggatatcgccgccatggagtatgaaggggatgaatggattgccaatatacaaaagcagacagcccgtctgacccgtctggtaagtgacctggtgacgctttccagactggatgaagagatgataatttacgataagacggtattttccctcagtgacgctgcctgggaaatcgcggagccttttgcttcgctggcaaaagcaggcggaaaaacgtatatccagaacatagaggaccgtttggagatggaggcagacagaaattcgattcagcagttattatccattcttctggacaacgcattgaaatactccgatgagggcggcaaaatcaggctggatatttaccgcagccacaatcgaatctgcatgaaggtatttaacacctgtgagcttcaggggataacggatctggagcgcctgttcgaccgtttttaccgtccggacgaatccagatccactaacaccggaggcacaggaatcgggctgtccatggctcaggctatcgtggaggcgcatggcggtaagattacggtgaacagtacggatgggaaaacaattatttttacagtggttatttaatcttacgataacccggcacgttccggtacggattatctgtttcaacgcgaaaggcacattacaataatattgttgtaatgtgtctttctttgctgtctgactgttaattgttcgtagaattttcacatttcatttcaagtacatttcaggctgactttttataatagctgatgatattatgtgcagtaatcttctcagactgagaaaaaacaaaaaaattcaggaggtttgctatgataacagttgagcatttgaccaaatgttacggtgacttcatggctgtcagcgatttgtcttttgaaattgatgaagggcatgtgtacggctttttaggaccaaacggcgccggaaaatcgactactatgaatattatggccggatgtctgtcggccacggaggggaaagtaataatcgacggccacgatatctttgaagaacctgaaaaagcaaaaaaactcataggctaccttccggaacagccgcctctctacatgaatgaaacaccggtggaatatctgaaattcgttggcgcggcaaaggggttaaaaggacgggagctgcagaggcaggtggaggaggtgatcggccaggtaaggattgacgaagtcaagaacaggctgatttccaagctttcaaaaggctacaggcagagagtcggtatcgcccaggcgctgctcgggaatccgaaggttattatacttgatgaaccgaccgtaggacttgatccgatccagatcatcgagatacgtgatctgataaaggaactcgggcagacccataccgttattttaagctctcacattctgtcagaggttcaggccgtctgcggcaaggtcctgattatcgccagaggaaagctggctgcatttgatgaaccggaaaatctggaaaagctgatgctggcatcaaacggcataacttttacggcagaggccaccggggaggatgccgcaagaattctgtctgcaatgaaatctgtcacagagtggacctttgaggataaaggagacgggaccgttgagattcacgcaaaaacagaggacagcaattcacgcgacatttgccgccggctcttttttgcctttgcggccgaggggaaggcaattttgagcatgacttcaaagaaagccaatctggaggatgtatttattgaactgaccgaaggcgaatccggagttgagaaaagcggtgaccgggaagagcaggatattccggcagtggctgatgatgccgggaacacgcaagatttcagaaaaacggaagattccgggtgcgctgaagattccgggaacgctgaaaattccgggaacatgcaggaggccggaaacgctgaaaattccggaagtgacagtgcagaaagtgagggaacggacgaatgacagctgtacttaaacatgaacttgccaattattttcactcattaaccgcatatatttttggtgcatttcttctggtttttgtagggattggggctatgctttacaatattcaggcggcagtgtccaattttgaatatgtactgcaatttgtgagccttggttttgtagtgattgtaccaatcttgacgatgcgcgtcatagcggaggagagaaagcagaagacagaccagcttttatattcccttccgattacaacttcccaggttgttgtgggtaaatatctggcactgctggtcgtattttttattccgctgtgcatcgtgtccctgtatccgctgatttttgcgcagtttggggatgtgtatctgatgacatcctatggctctctgctggcattttttatcatgggcgccgctctgattgccgtcggcacttttatttcctcgctgaccgaaaatcagggatttgccgcaggaattgccatccccgtcatattgtttaactactacagcgtcagcctggcggaacatatatctgcctccgccatgggctctgtcatctccctgtgtgccctggccgttattttgggccttgttatccgcttcctgacgggaaatgaaggcctggcattttcggtcagcctgctgctcattatcattatcgggattgccggttttgtcgatatcagcagttttgaagggcttctgccgaagataatgaaccggttatcactttttgaacgcttttattcgtttgtaaacggtgtatttgattttacatccattgtttactttatatcggtaatcgtgttctttttattcctgtccgtgcagtcccttgaaaaaaggaggtataactgatgaaaaagcatgaactccttaaaaagcctgaacggccgggaagaaacaggattgctcttcggggcggctcttattccctggcaatcacggctgtcgtactggcgatacttattgttattaatattctggcatcagtacttcctgcggcagtgaccaaatatgacatcagttccacaaagctttattcaattacaagcaataccaaggcagtggtcaatgcgctggaaaaggatgtgacaatttattggatcgtgcaatctgatgcggaagacgatgtaatcgaaaatctgcttaataaatatgaaagcctgtcggatcatattaaggttgtcaagaagaatcctgatgtttacccgacttttgcggcacagtacacatcggaaacggttgccaataacagtctcgttgtagaatgcggcgaccgcagccggtatatcggttatgatgatatttatctctatgagccgaatatgacatcctactcctataatgcttcattcgacggcgagggtgcaattacatccgccatcgattatgttgtcaatgaggaaatgccccaggtgtatgttctggaggggcatggggaggctgagcttccggaggcgttcagtgaccagatagaaaaggaaaacatggagttaaccactttctccctgctcacagaagattctgtccccgaagaggcggactgtgtcctaatctatgcgccggccagtgatatttccagagaggaaaaagacctgctggccaaatacgtatcgggcggaggaaaattgatggtactggccgggccggttgagaacggaacactggaaaatctctatagtttactggaggactacggtgtagaagcggcagaggggatcgtggtggagaccgaccggggacattatgcgttccaggcgccgtatatcctgctgccgaatcttcaaagcagtgagattaccgatccgctgatccaggaacattattattctattattcccattgcccaggggctgacggtcaagggagcggattcggcagaggtaacggagcttttgaccacatcggaaacggcattcagcaaaacggacggttacggcctgaccacctatgagaaagaggagggggatacagacggacctttcgccgtggcggtatccgttgcgtgcggaaatgacgggcagatgatttggtttacgtcgtcccatttcctggacgatatgtataatgcctattcatccggggcaaatctggatcttggcatgaatgcattatcatcactgattggtgagagcgaagcggtggcgatccgcagcaaatcactcaactacaactaccttaccatcagtgattccacagcctctctattgaaaacggtgatgattggcgtattcccgctgctgtatctcggtatcggtatctgcgtagtagtaagaaggaggagaaaagatgagccggtctaaaaaactttccgtattacttggggcattgctggcggtctgcctgatcacatttggagtcagtcaatatgaggtgcacaaggaaaagataaaaaacagcgatgaaattattttagagctgccgggtgacacggtaaaatcgctttcctgggaatataattccgaaaccctcgcctttcacaaagacggaaaatggctttacgatggggatggagcgtttccggttgatgaagagaaaataaatgagcgtctggatctgttcagcgaattcggggtttcatttatcattgaggatgtggaggattttggacaatacggcctggataagcctgtctgcacgattcatcttgaaacggacgacgagagctatgagatcctgcttggggatttcagcaagatggactcggagaggtatgtttcgattggggacgggaatgtatatcttgtgaaaaaggatccgctggactactttgatgcaacgctgagcgacatgattaaacaagataaaataccgcagtttgataaagtaacggggatacagtttacaggagcggaaaactatcagattggatatcaggaggacagcagcctcagctattgcaaggatgacgtttactttatggagcaggacggggcttaccttccgcttgatacatccagggttaacagctatcttgatacagtcagccgcctgaatccaacggattacgtaacgtataatgccacggacgaggaacttagggactgtggtttagataagccggagcttacggtgtcagtcaattatattccgcagacggagaataccgggcaggcagaaaagaaaaacgaggaaacatttattctgaatgtcgggcgtgatccggaggagaaaaaagcagcagagaaagcctctgccggaaagtcaatggatggagaagcggcagaaccggaggataagtccgaaaatgaagaaattactgcctatgtaagagtaggacaatcaaaaatcgtctacaggattacttcggatgaatataagaaactcgtcgatgtatcttacaatgcactccgccaccaggaaattctttccgccgatttcgccgatatttatcaggtggacatttctctggagggggaaaattatacgctcacatctgagaaagaggatggtgacagaacctggtattataaggaggaaaaattagagtcctcaggcttcttcgatgcgctgaagcaattgaaagcggacagtttcacacgggagcagccttcacagaaagaagaaatcagcctgacggtttatctggacaatgataattatcccaaagtgcagatggatttctaccgttatgatgggaacgattgtcttgcagtggttgacggaacacctgtatgccttgtggcaagaaactatgtggtggatctggtggaagcagtcaatgcaattgttctgaattaaggtaatttttattatattaactggtgatggcctgtacgcagagcgtgcaggccatcattagcttttatatcttatcacaatggagacaacaggactcgaacctgtatgaaaagcctgtaatatcaagggaaatcagccctcgtgtgatatttcgtgtgataccttatcaaaatgctttaggattttccggttttgctttgctgcttccatatcaataacattgcgatagacacttttcataatattgtcgctggcccatcctccacgctgaaggatatactgatcgggtaccccgattgcgtgcataatacttgctgcgtaatgtctgagatcgtgaaaacggaagggtgtaactccggaaaatttaacagcccgacggaaccggctggtgatctgctccggggtggccttgatgattcggccctctatcccggccatttttttgatgacaaaagcaggatattctatttcacgatagctgctataagtttttggctgtttaaccgaccagatgcgatccggacccatcaccatactcttgtttacgctcacaatatttccatggatatcatccgacgtcaaggcgcagatctctcctctgcgcatagggccgaaagcggccaggaggatggcaatctctaattcccttccagcgacatgtgtgagaagtttttggacatcctgatcggatggagtatacagttctggcttttttctcgcaggaagcgtcgtcttgatacggaagtcgggggcaaacatctctaaggcggcagagacgaggccgtgggcatttcggacagtcttcgggctgtggtcttttgcgatctcactaatccagatctgcaggatggtgttagtcagatcttttaacgatgtctcgcctaccttgcgcagatagcagcgctgcgtctgctcgtagaaagccaccgtactgggagataagacgccgcgctttgcatcgatgtattttgagacagccatatacagcgtgatattctctggacgttcgttcgcatttcctgcggcccatgcagcagccatgaactgtgcctctttcttggtggaggctgtaaaggatttgtagtgccttttgccatccacatctttatggtcaaaaatctggacgcgccaggagccagaggggagtttttttgcttttgccataatatcatcctttctgtgttttgggtataaaaaatacgccccttgccaggacgctctaaggatgatataatttaggtgtctaagctaattatatcttcccgggcatccggtaagagaaattctatgtgaaaagcttctgtgttcccgcacaggggctttttatattctatcgaagtagttgctttttcttagtatcaaattcatcttgggtgatggctcccatatccagcaattcctttaataccttgatgtcttctaatgatttttgggtatctattacaatagactctttcaaatctggtattacgatgtcgaaacaccttagagttgcgtccaattttgtgtcgcatttaaaggaaattttatacaccttttttgtatcaatactgataagggtaagaaaagcgatggtactattttcaacttttttttctatttgttgagaattagtagttttatgtcccttcgttttttcttttcctttgcttcctgcgcccatagcagcaccaacaagcgtgccaacaccaggcgctaccaaatttcccaataatgccccggcaccaattttcaatgctttcccctgttttttggtagtattttttccagttacattggcactggtatttgtaatgacgtcatattctggaccgttccattcgtacgatgatatagtgtaaagttttgatgtgtcagaattaaaataaatgctaccatccactctttgatgaatggataaggttaacgatgataaccccaattccttataacctgaaattggcgtcaatgaggcagaacggttgtttttaaattcattaatatcaaattcttttgtttcaagccaaggctgatgttcattgataaaattaatagtctgagtgattttttcattaacgctgaacccaaaatcaaaacgtatattagtattatcattttttttaaatagcagaaatccggttttaagacgagacgcataggaataattaacacctttcataacagaataaggaattgttatcttatttccaataaaagtaatgagattaatttcttcctttccgacaaaaagttctttagtagtcccttttatactcatagattaccttcttcctccgctttgagtcacattgattcccataaatatttattaatttgcaaatacggttcaaattttatacgataattttcaaaagaaacgccgtccccataaatttggcgatagcattccaatgcctctataagaaattcttccgtgacatttaaaaattctgcagtatcatttaaagtattgcaaccgtattcataggctttgataatatttgaaattccgacttgttttttataggcccaaagtcgagcaacatattcttgcttacgattatttgctatatttaaattaagtatatttccgctgcttgtataatgatgcccaagttcttcagcaaggacgcaagctttttcggtttcgctcaaagaattgtgaatagcaatatttccatctatgtataatcccttaagctcagatacttccgaaagatctaactcttgtatattcaaattttcattttcaatttgaagttcctcataagtcaaaatcaatcactccctttatttgatctggcagctaataacaattttttaaagtcgtttattttatttaattcttcctgtgtccaatttgtgttcttgtgcgcggcaatagtttgaggctcgttatcaacaacgtcatcatcgactaagtagtccaaactgcagttaaaactctttgctaatttttttaatgtagataactttatattgtctgaaccctttttgtaaaatccatcaatagtcgtatatggaattcctgatatacgagacagctccgacttattcatgtgattcttttccattagcatatctaatttttctgtaaacgtcatataactaacctccttataaaatgaatatacaacatttctattactttgtaaagtaaaaaaataccctgtgaaataaaaaagcaacactttagggttgacatattacgatgtggggtatataatgcgaatatattacgatgtagggtaacaaacggaggtgatagaatgtttcccaatttaaatgctgagttggcaagacgaaagttaactctgaaagcattgtccgaaatgacagcaattaactatgaaacgttaaaaaacaaagcgaacggaaccaccgaatttaaaagaaacgaaatgtatgcaattaagaaaaaagtttttcctcagtgtacagtggattatcttttttctgagggtagcacagatgagaaaggagcgtgagagatgaatttaacggatgaggggttaaagcaaattgaacattatgcagataagaagaaagatgtcagcacaatgttcatggtacaaattttgagagaactgcgtgagttaagagctctatttgagcaaaccaaggatccctgttacagcggcaatgattccacctatagcactaatgaaagtgaatattagcactgcggtgttgtagcctttttgtttttggctttgctcttcgagataacggattaccttaatagaatcatcgagacatgattccatgatggcgttgtgcaaatcctctgaatactgaggctcagaagttggctcattggtaggatgcaaaaaagattttaatgaagacataaacgatacctctttattttatacttagcgctgtaacacctgtaagtacattatagaatgaggtgacaaaaaagacaagagaggagcgtgagagaggtggaagaaaacaaaaagaaaaagactgcctctggcagaaagcagtctttaagtaagatggataaggcatttattttagcagcgtctttattaaaaactaaatatcaataccctgattagccaatatccgtttgagttcattgtgatagttccttaaaagaatagctgaataattcattagcatggcattttgcttcccagattcagaaacttcttcgtcgtcaacattgcaatagtttttgaattttccatcagcgacttctttcatggattcgtctaatgactcacaaatgatttttgatatatccatagtgtgaatatttctcctttttcctatactcggctctggcaggagcctgtacttagattataggagataggtaaggaaaaggcaatgtgtctatggaaaaagcgaaaggagcgtgagagaagatgttgatgccgagaaagaagtgggaggcactggagaaaagattattggttatagaagaaaagcttgtaagtaaaaagtatgaggtaaagaaaggagacacccttataagtatctccctttgcgaatatggaacaaaagaaggatataaaaccatagctgaaataaatggattagatttcagcacgattctttacccagggcagattctttggattccgccgaaagcgtgtttaaaatttgtggggatccagaaatagctttttgctggttttatcaaaagttttatttatcgaggttgcaatttcaaaaaatatacgattgacatcatcggtatcactacaggaaagggcgcatcgaaactcatatatcaacgtttttaaagcggaatcggtgtattcatagttatctaaaagcatattttgaaatattttttgtttttcatcggataagtctgtaaagcaaaatgctccaggcccagccttcaggtattcttttacgaaaggggcgtacagcttatgaaaacgtatggctataatatttcgtttttcgagaaaaagctgatgccatcgcccggcaccatagccaagcatagcagtaagaatacaaacgatataggttgagtattgagataatatttccatgaaagacctcccttgcatttgataaggaaattgtaccacagcaaggaaaagattaccagacaagaaaggagcgtgagagaatgaaaaaaagtgcttatcagcgtcatgaagatgaagtgaaacttttgattcacgaagcaaaagtaagaaataatctaacagatgaaggccttgcaaaaagaataggaatgcccttaagcactttgcgaaaccgtaaggcgcatccgggaaggtatcgattagatgatctctggctgttcgagcagctggctggacgtccattgaggggaggtgataccaatgcacaaacattataacgatggccccgaggctgtcaagcaggcacgagaggcagaagcaaacaagcaggtagagcggataacaggcatgatggtgtggatgacatacggatggattattgcggccggggtgttcctgcgggcggccggatggatgtaaggaggaagaaaagatgaagagaaagaaaacaaccatatggtgttacttggatggtaaaaagcattgtgatgttgtgcagtgggcattggcagcgaatgtgatggtcagtgatgcaaaaaagatgctgacggagcaatacccagggatgacggttacttttaaaaaccagtagggaggccaaaatgagtagacgaagaaacgggacaaatagagctggggccgccatcggagtaagccgctatacggggaaactgatgccgagaaagaaaaagaacctgccggcggcaaccggacaggctcaggtaaataagtaaattatctaatgcccttagtataagggatcttcaggaggaaatcaatgaaaatcaaaaaaattaagatccgtaacttatatggaatcacagaatatgaagcagacggaacgtcagttgagctttccggaaagaacggaaccggcaagacatctgtaattgatgccatccggtatgccctgacgaataagtcagaccgccgatatatcatcaaaaaaggagccgaggaaggtgaaatcctgattgagacggacaatggcatacggattgaccgaaagcccaggacagcgcaggcggattacaagagcgtgaaaaaggacggccacgaggtgggaagtccagagaccttcctgcgggatatcttttctcctctgcagctttcaccggttgaatttatggagaagtccgaaaaagagcagaacgcgattattctggacatgattgagtatgcctgggacatgaataccatccgggagtggttcggagaaattccaagttgggtatcttacgaccagaacattctctccgttttgaatgatatccagtcggaaagcggagcatattttcgcgaacggcaggatattaaccgggatatccggaataagagagcgtttattgaagatatcgccgatacgatcccagcaggatatgaagcagaacggtgggaaagtgagaacgtcggggaactgtaccgggaaattgagcgcatccggaaatcgaacgatacaatcgaaaaagcgaagcggctgctggagaaccgagataataaggtgcggaagttccaggcggaccgggagattgaattggcatccattgaccgggaatatagccggaaggaaactggcttaaaagaacagattgccggattggaagaacagatacggtctttaaaaaaggagctgtctgggctgggagataaaaagcaggacaagattgccctggcagaacaaacctataaggcgaatgtggcccgttatgatgcagaggtggcagagtacgaggaatacgccggaatgtctctgcgaaacacgctggaattagaggaaagagcctcctatgcagaagaaatgaagggacacctgaatgagtaccatcgtatggaagcgctgcagaacgaagtggagcagatgctcggggagtctcggagcctgacagaaaagattgaaaaggccagaagactaccgggagagattctggagaaggcaacaataccgatccaggggctgacggtagaaaacggaatccctctgattcatggtttgccgatcagcaatctgtccgatggcgaaaagttggatttgtgtattgatgtggctatccagaagccgaatggtctgcagattatcctgattgatggagtcgagaaactgtccacggccatgaggaaagaattgtaccgaaagtgccaagagaaaggactacagtttatcgcaaccagaaccacggatgatccggagctgacggttgtggaattataggaggaacgttatggaggaaatcatgaacatggaagagaccactgtgctatcgaatccctttggctcagaattgaattttaatgtactgatgaaagttgctgaggcattttcaaaaaccagtattattccggcggtctaccagaataagccagaggactgcatgatcgcaattgatatggcaaaccggatgcaggtaagtccgatgtttgtcatgcaaaacttgtacgtggtaaaagggaaaccgtcctggagcggacaagcttgtatgtctctgataagggcaaatccagagtatcaaaatgtgcggccggtttatacaggtgaaaagggaaccaatagctggggatgctacatacaggcagtacgcagagagactggcgagatcgtcaacggtccagaagtgacaatcggcattgcgaaggccgaaggatggttttccaagaaagataaatatgggaacgaaacctctaaatggcagactatgccggaactgatgctggcctatcgggccagtgcattcttcgccagggtgtatattccaaacagcctgatgggatgtcgggtagagggggagattttagatatacaaccatccgatcgacctgccgcagtagacccgttttatccgccggaaggagaggagggaccatttaaatgatattgacagcagagaattatttcagtccagaggcagatagggagtatttatcggtcagccagtataaatcattctgcggcagtctggggaaaatcccttgtgaagcggaagcacttgcaaagctgaacggagagtgggagcaggaaaaaacagcctctcttttggttgggtcttatgtagatgcacatttcgaaggaaccttaaatctgttccaggcgcaaaatcctgagatttttacaaagcagggagctttaaaagcggagtaccgaaaagcggaagagatcatcagtcgaatcgagcgggatgaatattttatgaaatacatgtccggcatgaagcaggtgatcatgaccggggaactgtttgggtccaagtggaaaatcaaaattgacagctatctgccggactgctgcatcgtggatttgaaagtaatgaagtctattcgtgagacattctgggtccgggataccggctatatggatttcatccagtattggggatatgacctgcagggggcagtctatcaggaaattgtccgtcaaaacactggaaaaatcctgccgttttacatcgcggcggccagcaaggaaaaggagactgacattgaagtgatccagatcgatgatgcccacctgaaagaaaaactgtatgaggtggagcagaatgtgcctaaaattctggcgttgaagtctggagagattgaaccgatccgatgtgagcggtgtgattactgtaaacacacgaaggtccttcacgcaccaatacattacacgcaacttttgacggaggtgtaagatgagccagtcaattgttacaaaatatacagcaatctgcatgttttgcggcaggccgacgacggaagagcaccatttgatattcgggaaggggcgccgggaactggcagaggaggatgggctgaaagctcccatctgtcagggatgccaccggatgaatgagaacatcctaaaaatacacgggaatccgatggctgaaaagctgtcgaagatgttgggacaagctgtctatgaggcacagattgggaccagagaagaattccggaaacggtatggagaaagctacttatgaaatttgtaatcaagggatcctattatggagacaagaccttcccatccctgaatgattatatccatcagcttgggacaaacccgagagcaggcggacgaatgaagaaagagtattccatgattgcctgcaacgccattcggttaggcttaaagcggtttcagaccaagaagcctgtgattctgcattatcgtttctatgagcctttaaaaggccagaaaagagacgtgatgaacgtgttttctttcgcggataaagtgattgaggacagtctgattcgatgcggtgtgatacagaatgattcccctcaattcgtgaagaacacgacacatgaatttttttatgcggaagttccacggattgaggttgagatcgaggaattggatgttctgccgtaaggcattacatagcaaccattaacattcttgcacttttggttaatatatcacgtatgccacttaagtgcacgggcggtccctgactggccgcccactcctaacgaggaggtgaggagtgaacgattttgaattatttacctattcggtttataacgccctcggagtaggacaccagaacgctcagacacgccgggagctgtgccagaagctccactgtggagaccgcagcttaaggagagcaatcgaagcattgcgacgtaattatgcaatcctttctaaggatgatggaaagggctattatctgccagaaaccagcgaggctggccgagatgaggccaggcagtggctgaaacgccaaaacgaccggatgcatagtatcaaggcatcacaagccggagcagccaaatttgcaggtcagtaccggaggcagcggcagaacgaaacacttgggcagctcaatatgtttggcgtgggtaggagcctatgagcgattttataaagttaagccgaaaaattttggagtgggaatggtattccgatattaacacaaagattctgttccttcacatgcttctaaaagcgaattggaaggatgggcggtttcagggagtggagataccgcgcggctcttttgcatcgtcttaccagggactgtcccaggaaaccggattgtcaataaaaaatgtcaggacggcactggaacatttaaaaagtaccggagaggtggcagtcaaccgacacccaaaatttactgtatttacaataaaaaactaccatttataccagtcaaccggcagtcaaccggcagagaatcggcagtcaaccggcacagaatcggcaacaatagaagaaggaaagaagaaaagaaggaaagaaataaaagacgtcgttgacactccgcgtcgaaaggccgggccaacatcgtttaccgaagaatcgtttgagatgcaatgcgtcaattccctggtgcagtcttgtctgcgtcaattcccgggtgcaaaggtcccaacgacagcgacggaaaagagcgagtggtgtgtccacgtggagcggatgaagcggcttgacggcaggagcgaagcggatatacaggaggcattgcaatttgccatccaggatccgttttggcagaccaatatccgcagcactaaaaagctgcgggaaaagtttgaaacgctgattctacaggcacggaggccgaagcgggcggaagtgatggaaaagtcaaagaaccgctttcacaacctggaagaacacggctatgactatgacaagatggtatgggagatgatgaacaatggagatacgtaaccagattaagcaggcagttattgattacatcactttgcatggctatcctccgacgatgcaagagataggacaggccgtgggccggtgcaagtctgttatcaacggatacgtgacacagatgctggccgacggagagttgaagacggatgctatgcagggagcgccgcgggcgctgcgggtgccagggatgcagtacgggggggattaccagagagtgcgagagatcatcgccagtatatcgggatgcgacgggcggatgattacgcccgcggttgggacgatgcctgcgggacgatcctggaggaaatggaacgtggaaagaagaataagtaaggcggagctattggcggtctatgactggatgcgatccgtcagaggatattgggagcgctgaaaaaattggaagagatatgccgattgtgccggaggacgaagtgggtgccgaggaacagaggtgatcatgcgaaacaggaggcgttgccagagttgcagggatggagcaaagcgaaagaacgaatttaagtaaagcagaaaggaggccggagcggcgcgcgcaaagggatcccggctcctccaaacaatgaaagaaacttataaaagcagggtatatacagaccgtccaccatatgcggactttgaagcaccagccaaattcacagctatacaggcaattatcgcaaagcggataaaagagcatccaaaagcaatatgctcttactccggaggcgcggacagcgacatcatgctgcatctcatcgagcgcacacgagaactttttaatctgccgccgatcgaatatgcattttttaacacagggttagaaatgaaagcaacaaaagaccacgtgaaaaaaactgctgaaaattacgggatcgaaatcaaggaatacagacccaaggtcaatatcgtccaggcatccagaaaatacggaataccatttgtttcaaagattatgtcttctggtctggaggaatggcagaaaaaaggagttcccttgtcgattgcggaagagtacgaaaaagcagaggataaagctgcaaagcggaaagagttgaaagagcgatatccaaactgcgaaagcgtaattaattttctatgctgctgtaattccgccggggaaccgaggccggacatccagcttgtgattaattcgtcaaaatacatgcgggactttatcggggagtaccctccggattttcagatcagcgcaaggtgctgcgattattgcaaaaagcaggtggcccatagggcgcaaaaatatttcgacatgatcatcacgggcgagcggagggcagaaggaggtatgcgatccgtacctcgtaaggacagctcatccatgtgctttaccgaaaccagcagcggtcagtacaggctccggccattatattacgttacggatgcagataaggaatggtataaaaatttctatggaatcaagttttctgacgcatatgaggtatatggcttgcgagaaccggatgctgcggatgccctatttcctacagagccgtcgaagacttggaaaaaatccgtccatacgaaccgaacgtggtaaaggcggcctggaacatttttgggaaaagtatgagtacagaatgcgctataacaaatataaaaaacagaagatgcaggaaacggaaaatatagagggacagatgtctatttttgattttccagaatatctgccggaagcaatgaagatttaaaggaggtgcggaatgattagcgaatgtagcgtatgcatttgcccagattgccgaagcaggatgaatgcgaaatttgcaacaaatgttatactgtcccggagacaatgcgaaaagtgaatgtccgtttggtgaatctgataatgaggattttgaggaacgaggaaaggacagttattcatgagagaagaagttgacgtaaacaattaatagcggaattttctgatatggctggtagatgtagtttgctgactggtgatgtggagcaggaagaattgttgattcagattattggaacaattgctaaagtcgctatgggacggtaactgaaaatttagaggagagagcatggaaagattaacagaaagaagcgagaacggaaccgcggtatacctacatccaacaagagaaccggagggatgggaagccaacagagcagcagtgcttgaacgctgctgtagctatgaagacaccggactgacgccggaagagatcatggacgcagaatgctgacaggatggattccggtggaagagcggcttccggctcagaatatggctatatacgcatcggtagaatgccataacgaagtaaagaggttcggacggcatactatcgtgacggagattttgtaaacaatcaaggctgctcgctgtataagatcattaaggcgtggcaaccacgttggattccgatgccgtatgatccgcaaggttgacaaagcgtgaatacaccgtaatggttacattgaagatttagaggaggaaccaggaaatgaatacaggaattatacggagagtagatgatttggggcgaatagttttgccaaaggaaataaggcgaagttaggaataggtgaaggaacacctatggagatgtttgtctcagcagatagcgttacattgaaaaagtattaccaccaaagtgattagcaggtatggctgcgaaccttcaagaagctgtggaagatatgtgcgttgacttagggcctgaaaaaaacaggggaattcgacgcatatcagagaaatacaaagacttcttgaaccgcaatattaagattttaggaggaaaaaatgaatagaaaaaaaaaaaacaaaaaacaagattaaagaaggtgggctggttgcagctatggttattgttgtgctgattgcctgctatggcctgagctggtcgttacatgtggaatcattaaattaatcaccatgtgtttcggttggacattcaaatggtctattgccactggaatttggctgattatttgcatattgaaaagcatctttaaaacaaccaatcaaaattgacaaggaagtatatgaagattttcggaaggaaggtgccagatgagaaaggtgcaatggtgtgtaaaatgtaaaaagtatcatctttttgatgatgtaaactggaaatataactggaaacagagaacatgggagtgtttgaaaactgaggatttagaggaggatagaatgacattgagaacacctaaaccgacgagagaagaaagagcagctatgacacatgatgaattactacgctcgatatggttgctggatgaagtaatagagttgtttagatggatccaataatatgcatccgcatccatccataggcaccgccgtaatttctgcggtattcaagagcataaatcatatcgcccccggtaattcttctgcggatgtcgcaagccgacagctcttccataaaccgtttccgatcttcctcatgaatgaaatagctataaaccgttttcagatattcatagtccgtactgctgccgagacggcaggccagatcgtccatcagattaaatggctggaatgattctgtgagcaggtcgatgtagaatacggagtgataaaaaaccgacaggcccctgataatattctgcgattcaaaatacagccttttttgctgctgttcctccagctctttcatcttttgttcatgtatctgcatattggcaaaaatgactttacttacacggccgtcttttatttccgcaatactaaagcgtgaacggacccagataaggccctccgggtaaatccttctgaaatcaatgtcatagaccggatgctgcgcagacaatgtgtttcgcagaaaatccgggcttccggcgcggcgcattttttccttgtcctcgctgaagacatgatcgcggataaatttatcatagtaagtactgagactgcctttgggaaattcccggctttcccggataaactcttcctgccagacagactcctccatatcgttgtccaaatcaaacaggtagatggaatagtagcattggcacagtgtcgaaagcacatcttcccgcatctgcgcctgctgcctgtcgtcctgttcgtcgaaggcggggataacgaaggggtgtttggaggaatatccgtcaatcggcaggagcttgatacgtctccatccgccgaatatgtctctgaagatgatttcgatctgcttttctccgtcagacagccttttggaaataagcttcgtatccgccaaaccgagcaggagggggcggtagggaacggccacctcttcggcagagtagacacggaaaaagtctccaaattttgtatatttgagggagagctcctgaaggcgtcctgaaacttttatggccttgtagctctggtcatccagattgcaaaggaaaattccggtataactttcgcccagagtctggataatgatatcatattcttttttcagcataaaggtattggtgatattctgatgatatcccctcagacagacgccctcagtatagctaaagtcgcgtttaccgccacagcgtataaaaatctctccccattttggatggtgccaggtatactgtacctcggcgcggccatcggaagtgattcgttccacggcagactgcacaaaatcgtaatagtcggcgtcaatacggtcataccagacgcggtaacactcctcgggagccggttccgtactgaaacccagcagttccagcattgtatgatccgcatacatccgcggctcttttccttcgttaagttctaaaacccagagccccatttgagcttcatggaggagttcctgtattttctgcgtatctttaaaatgatccggcatttatcgattcctttctataaaaaagaatagtatgcttccgccgggagaggagcttaagtccgctgcggcggaatattcatgaatattttacatatatatttctattctatggtaaaagtgtgggcgatgcaagaaaaaaatggctgctgtacctttaaattgcaggacagcagccgaagcttatatttttacggaaaatttgtagcccagcccccagactgttttcagataccgggggtttttgggatcttcttctatcttgtttctgagatgacttatgtaaaccataatcgtattggcatccacgacggagccgttccagacatgctcatagagctgttcttttgtgaagacacggccggcattgcacagaaacagcttcattaaaacattctctctggatgagagaggaatcggccggttatctttaaagagttccattgtcatactgttatagcaaaacgggccggccgtgataaaatcagggagcggcctggaagctttcatgtccctgcggatgagtgctttcattttagcgcccagcaccaccggattaaagggctttcctatataatcgtcggctccgatatcgaggccgtacaaggtatcgaaatcctccgtacggccgctcagaacgatgattggtatctcattcccggaggccctcaggcggcggattacttcaaacccttcatcatttccattcatcataatatccagcaggatcagattaatcttgctgtcacggctcatgacgattgcctcatgtccgttggaagcggtaagagactcatagccgcagctggcagccacccgtgtcagcagcttgcgtatcgcaggctcatcgtctacaatcaaaacagtaccgtctgacataataatccacctttctttttcaatgcgtatcttcattatagaaaaaaacatgaaaagataccgttaatttcccgctaagactgccaaaattgactaaaatgtgaacgtttcttaagactttttcatgagatattaagaagagcagaataaaatggggtatgactgaaagccaatgggcaagaaatcaaaagaagtcgataaaaaaaggaggagtatgttatgtctttagcttttctggggtttgccatgatcgttgtgtttatggcgctgattatggcaaaaaaattaagtccgttcacatcattgatactggtgccgattgccttcggactgctggccggttatggatgggatacgcttaagtacgccatggacggaatcaaaagtgtagcatccacattttcaatgatgacgtttgcaatcctgtatttcggggttatgctcaccgccggtatgtttgatccgatggttgacaaagtagttgcctggtgcaaaggcgatccgctgaaggttctggtgggaaccgctgttcttgccgctttcgtttccctggacggagacggaacaacaaccgtcatgatctgctgtacggccatgattccgatttacaacaggctgaaaattaaaaagatttatcttgcaaacctgattattcttcagaattgtattatgaacctgattccttgggaggtccgacggcccgtgttatgtccgttatgaatctggacgccggtgagctcctggctccgcttgtaccgggaatggccctgtcggcagtctatgtaataggagtttcctactatctgggactgaaagagcgcaaaaggctcgggattatggatatcagcaactcggtaaacacagtggagctctctgacgaggagagggagtggaaacgtccgaagatgattctgttcaacctgcttctcacggttgcaatcatcacgtccctgattatgggtctggcatcctccgccattctgtttggtgtaggtaccgcaatcgcactggtggttaattacccggtgcagaaaacacagagaaaggtaatcagctcgctcgcacccgacatgatcagcgttgtcatgatggttctgggagccggagttctcatgggagttctgaacggacctgaagatgccggcatgtcaaatgctattgcacagttccttgtatcggtaattccggaatctctgggacgttattttgcagtgattattgccgtgatcagtgcgcccggtacataccttctgaataatgacgccttctattacggtgttctgccgcctctggcagcgacggctcaggcctatggctttacggatctccagattggttttgctgccctgatgggtcaggccttccatttcctcagcccgctggtgccgtttatttacctgctgatggatctgacagaaatttcgctggccgagtaccagggctatattttcaaatggtgtatcggaatatttgtaatatttatgggagccgggcttctgctcggatatcttccggtgttataacagttagggtttataaaataaaaaacaatgccatattacagttttaattgactgcaatatggcattgtttatttaatttaacaggaaagttctcctgttaaattaaaaccgctccgcaaaggatcgcaactctaaagagggcttgttcactaagctcgttacactcgctaagtgagccaatgcctgcggcggcaggagcttaccgctggtgcggcaggttcttttcaattggaatcacgctgggcatggacgccacaaatttttttgtttcctcgataaacatgcggacggcctttgcaccggagggattggcttctctctgggtcacgagatagattgtccgggcgggcagctccggttcgggtgatgagatgacaatatttctgtcgcggttaatcatctccgccacacagagcgggacagcagcccatgcacgttctgactggagaaaaaactcaatcagggcggagtgtcgacagtgacctttggttttgtgataggactccagtttcggttatgccagatttcaaattccacgcccaggtcaatataagtctcgtcctccacggacagcgactccacttttataatatccggataggaggagtagcgccggtcactgaccagaaccatcggctcacagaaaataggcgaagtgacaagattcctggatggaaacggccgggatacaaagccgatatccaggaggtaattgtccataagattataaatggtattgttccagtgggtgctgattgtaagtctcagctggctgctgccggagaaacggctgtaaaggccggtaaataaaaaagaattgatgctgtgcggcgctgaaaccttcagttcatagcaggacaagttctccttccaggttttaatatctttttccacctccagataacggctggccagggtaaggaattcgttgcctttcggagtcagggtcactcctttgattccggggcgccggttcacgagaggacttccgatttctgactccagattggtcaggcggctgctgattgtagattgggatacaaacagtttatcggcagctttagacaggttcctggtctcggtgatagccagaaaagcctcaatttcaagggggttcatacagcacttcctttctttaaatatcgaaaaagccgatgattatgaacaggttttaatattttacatcagaaaaagccgatgttataattcttatacaagttataaattttattaaatattatcagaaaaaaaacctccttgcaaggaaaaattcaacatttgcttcggccggagcatatgaaaaaaagaatcaaagaatgtggtgacagaaaagaacgattcagatgtaatttaggaggaagaaaatgaaacaggcggatttagtaatcaaaaatgcaaagatttatacaaacgggactttttttcaaggcgctgtggcagtcagggacggaatgattgccagcgttagcacggacagtgaaatacctgaggcggagaaagtgatagacgcagagggaaagtacctgcttcctgggatgatagagtcccatatgcatgttagagaaccgggcagaccggacagaggaaccttctttacggagacgaaggcggctgccgccggaggtgttacgacgatcctggaacatccgattgcaaaaccgccgcagtattccaaggagatcctggagagaagaattcgtgatgcctcggacaaatgtgtcgtggattttgctttctttggtgcggcaggttcaaagtatcccgataaaatcagagaaatgggggagacgggaattgtcgctttcaaaaccttcctccatgatgcgccggagggaagggacgaggaattcatggggcttacgatggcaaatgacggggagatgtattttggcttccgcgaagtggccaagacgggtaagctgtgtgcggtccatgcggaaaacaatgatattatttcgaaaatgataaaggaattcagaaaagagggaaaagtgtccccgatttaccattgcctgtcccgccccaaatttgcggaatatgagacagtcggaaagctgctgatgattgcaaaggactgcggtgtgaagctgatattctgccacatgtcgactcctgaatccatggagcttatcaaatcggccaaacaggaggggctggaggtttatatggaaacatgtccccagtatctgttcctgaccgaggaagatgtggtaaagcatggcgcctatgcgaaatgcaatccgcctcttagaaaaaaagaagacgtggatgcattatgggattatgtaagagacggttccgttgattttataggaagtgatcatgcgacttatacggttgcggaaaaagaaagcggaaaagatgatatatttgtggctccatccggtttcctcggcgtggatctccgtcttcccctgatgctcaacgcagtcaatgaaaagaggttatcgatggaacgcgcagttgatctcatgagtacgaatgtggcaaaatcatttggcctgtatccgaaaaagggtgtgataagcgccggcgcggatgccgactttgtaatggtggacatggatgaggtatttacggtaaataagaatcaaaattactcacagtccagggaaattgccaaagtgtatgacggctggagactgaagggaaagccggtgatgaccgttgtcagagggcgcgtggttatggaaaacgggattgtggatgaggagagcaagggctggggacacctgctcgaaacatatatagaaaaaaatgaggaggaaaagggatgattccagattttataccggcagatttgaagattttttggctcttttttggatttctcagcctgcttccaatgattttggcttatattacgcagaaacgggatgacagacggaacaagtagagtgatattcggaggagttattggaggaggtatttatggtttatgtgataattctgctgctttatctggcggcactgatttttgttgggaagcttgcgtcacgcggagtatcaagcagcgatgactgggcagtggcggggaggagccttggagtctggtccagcgcggcttcatattttacgacggtattgagtgcggtatcttttatcgggtatatggggtattactatcagttcggatggggaggctggtggaactgggcaggaaccttaatctgtacgatactgtttgccggattttttgcagcccgtctcaggcggtttggcggtgtcacaatttccgatttcctggacagacggtttggaaaggcccatggggcgatagccgcagttctaattttattttcaaccgttctgtttaccatggcccagctggttgcatcggcctccattattaaggtgatcacagggattccggagtatctgtccgtgataattgtggggatcgtgtttctggcctttacggtgacgggcgggatgaaatcagttgcatggaccagtgttttgacatccgttttgattctttttggagcatatgcgctgatgattgccattctcggtaagacaggcggattctgggaattgcaccggttagcttacacggaggacccggcgcttctggatccttttgccggcggaagtatcggcgcaggactggcgctttcatggtgtgtgacctgggggattggtaatttcgggctgccgcagcttattacaaagtttaattcctgtaaagacgaaaaaacggcgcgttacagccagggaatttcgggcatactttttgttcttttttatcttccgcttatggtaattggcctgggaatgagaatcctccggccgggcattgtacagacagatacggtggcttcaattgcaatggtagaaatggtgagtcctctgatagggggaatcgtgctggccgccatcctgggtgccgccatatccacggcagcctccgtccttttacaggcgggaaccacggcaaccagggatatctatcagaaatttatcaatccgaatgcagagggggagcgggtactggcgatatcaaaaggaacgacattgacggttgggataatatcgatagtattgtcactgtttaattcttccaccgttctgatgattcagtccaatatggtgggcgttctcggctcgatgcttgctatgacgatcattatcggatttacctggaaacggtcaaacgcccagggggggatggccggtatgctggccggtatcctgacggcagtaatatggtatgtactgaaacagccatttggatggatgccaattcttccggccattttcacgtcgacggcagccaatatattagtaagtctgatgactccggcgccgcccaaagagacagtggatgaattttttggaaaaaaggacagaatagaagaggagccggagaagaaatttgcagatgctgcaggaacaggaggagaaacatgcggacagatgtgaatatggaacgtctgatggaaagccttcaccggacgggggatatcggaaaaacagagaatggggggatcacccgcccgggctttagcagggaatatgagatggcgtctaaagaattaatcgcaatgatgaaggaagccggtcttacggtttcaaaagaccgggtgggcaatattatcggacgcagagagggaagcaggaggggggctttgtcgattatgacaggttcccatcttgatacggtaacggaaggcggactctatgacgggaatctgggaattatttctgctctggaagctgtcaggatgatgaatgattatcaagtggagacggctcatccgattgaggtggttgcatttaacgctgaagaaggcagtgaaatgggaggaacatttggcagccgtgtaatgaccggacgtcaggatttgaaagaaaagggattatgcgaaaaactggcccgctatggtctggactgcagtgatttggaaaggtctattcgtgatatgaatcaggtcggggcatttatcgagctgcatattgaacagggagcatatctggtgaatgaaggctgcgacatcggaattgtagacgggattgttggaattacccgctatatgattcatataaccggagaatccaaccatgcggggacaacgccgatgaagctgagaaaagatccggtgagggctgcgtccttactcatagagaagatatgggatactgcgctcagatacggacatccttttgtcgccactgtgggggatgtcagggtaaaacccgggatgtataatgtaattccttctgaggtagtccttttactggaactgcgtgacctggatccggtcagggtagagcattttacagaggaactgaagctatatggcagcgttgaggaagaattgaaaccgtttggaattgaatttgaacttcaggttgacaaaccgtcgagaatgctggacggcgctgttatcaatgcaatttccgaggtatgccaaaaagagcctcaaattcgctccgtaacgatgtcaagcggtgcgggccatgattcaaaagagataatataccgggtaccggccgggatgatttttgttccgagtgaaggcggtatcagccattcgcccagggaatatacgacggaggctcagatagaaaagggaaccagggtgttgtatcagacactgattcttatggacaaaatgaagtgggggagagaaaatgaagatattggtaataaatcccaacagcagtatcgaaatgacggagtcaattaaagagacggtccgtgccgcagcaggagacagatttgaagcagaggtatgccgcatcacggaggcgcctccctttatcggcagttatgcggatcagctggcctcagggccgcacctcttgaaactattgaaggaacaggaggacaattatgatggatttatcattgcatgccatctggatccctgcctggatgctgcaaaagagataacagggaaaccggtaatggggattggtgaggtctctatgaggatggcgccgcttcttggccggaagttttccgtagttggctcaagttccgccactacttatctgaaacgccgtatggtggaacagtacggactggaaaaatttctcgcatctgtcagggcaccaaaacctgagtggacaggaagccaggaagaactgttgattcgcgcggccgggcaggcggtccgggaggacggagccgatgttatcgtactggggtgcgccggttttacaggattagatgaagcgattaaagacgacgtaaaagtaccggttctggatggtgtggcatgcgcgctggccgttatggagggggtgctgaacatgagagggtgcacctgccgtaaataatagcaaatgatattcaaaacgacatcgtgatatagtataatcccgacagaaattgcacaaaagccggacggccggaaagagccgcccggcttttgtgctgcctgttatttgctgcatggattaacagggcatgtgaatcatccagtcagagatgctctgttaagtttgacaaccgttatagttgcagtaccttcagtgtttgtgacaggactgttaaaagtcagggaaaaacgggtctgctccggaacatcgatgataatggagttggagccatatgcggttgtataatttgaagcggttctaaagtatattccatattcaatatgcgaacttccattgtaatatggtgtgatttgcatatatcccggtgtactgagaatggaagaaacatggtatgaaattaaataatatccgggagcaaggtcaatatgggtgggatccgataagacgatctgcccggtaggatcagccgtagacgttcccagtggtatttgtgtggcgttggtaaatggaattgcaaaagtggcaaatgaggcaaaaacatcgtctggggcttcgccggcaggtccggtagcgccggtcgggccagtagcaccggttgctcccgttggaccggtagcgccagtaggaccggcgggccggtagtgcctataaggccagtagcacctgtaggtccggtagcgccggtaggcccagtaggcccggcggggccggtagcgcctataaagccagcagcgcctgtaggtccggtagcgccagtaggcccagtaggcccggcaggcccgtttgcgccggtagttccggtaggcccggcaggccctgtgggtccggaaggtccagtaggcccggcgggtccggtagcgcctataaggccagcagcccctgtaggtccggtaggcccggcaggtccggtagcaccagtagaaccagtagcgccagtaggcccagtaggcccggcaggcccgtttgcgccggtagttccggtaggcccggcaggccctgtgggtccggaaggtccagtaggcccggcgggtccggtagcgcctataaggccagcagcccctgtaggtccggtaggcccggcaggtccggcaggtccggtagcaccagtagaaccagtagcgccagtaggcccagtaggcccggcaggcccgtttgcgccggtagttccggtaggcccggcaggccctgtgggtccggaaggtccagtaggcccggcgggtccggtagcgcctataaggccagcagcaccagtaggtccggttggcccggcaggtccggtagcaccagtagagccagtagagccagtaggcccggcaggcccagtagcaccggcaggcccggtatttccgcgcggaatttcaaaattaagaaccggcctgcagcaagttcctgagttagtgaccctggcgctgcttcccggtactccggtcagtgtagcacccactgtcacagaagggcagcaggcgtgagggcatggtctgtgacactgcccctgataaggagagcaggagcagacttgttttgcataatctttaaagttatcatcaatatacataaaagacacctggtatatttaaaggtcttattgtagaatatgaaaatatggacaaaaggtgcggcctgtctgccggagcgttactgttcacaatccgccaaaaaacggcgcgccgtgaaattcgggattttcgtgcaaaatgtgcacgaaaacacctggcggaaacaactgtgtgaacagtaacgccgctacctcaaaaaacatcatataaaaaaataatagcagttgaaacttttctgaaattcagaccgtctaaaggttaagaaaggagagtagaaaagtgggaaaagagacaatgcgggataaactggaagaagtaattctggcttcctatgaatccatgtacaggatggcatttgtatatatgaaaaatgaatcggatgcattagatgtggtacaggaaagtgtggtcaaggccatcaagagttccggccagctgaaagaggaatcttatatgaaaacatggctgtttcggatcgtaatcaatactgcccttgatgaactggaaaagagaaagaagatacttcccctgtactcggaaaacgaagattcaaaagaagacagatattgtgattttgatacgataaattctctggcacagctggagcaaacggaaaagacgattattctgctccgatattgtgaggagtggaaactggaagagatagcggagtatatgggacttaacctgaatacggttaagagcattctgtacagaagcttgaaaaaattgaaaacagaattgatgaaaggagaggcggtttcatgaaaaaagcggacaaaggccgggaagaaataactgatactgagagaaaagaactggaactcctgacggaggataaggaatttaatcagagattgagcaaactggaaaaggaatatcaggagataaagataccggatgaattgaaaggaagagtgatacaggcaatgcaggaagcgcgtaacgacgcaaaagcggagccggatgcctcagacaaaaagatggaggaggatccgagaatgaatcgaataagaagaaaacaaaaggataaaaaaacggcagtccattatctgctcaggacaacacagaccgcagcggcagctctgctcgtcatcacggtcctggctaatacaaatgcccagacagcttacgctatggggaaaatcccggtaatcggggccattacaaaagtagtcacattccggacatatgaaaagcagaatgagaattcggaagcaaaagtggaggttccccagattgaggctgcgaaagattccggtatttcaagtgcggccgatcaggtaaacaaatcggtagaagagtatacaaaccaggttatcgcccagttcgaggaagacgtgaagagggacggagaggaagcgcatctgggagtgtacacggaatataaggtgctggccgacaataaccggttctttacactgaagattgagacggatgaaattatggcaagcggataccagaccgtcaaaatttacaatatagataagaagagcgataagatattacaattaaaggatatgttcccggaaggcacggattatgtaactcttttgagtaatgcggcaaaagaagtgatgcaaaaaaacatgcaggaagatgaagataaagtatatttcctgaatgatgagatgggagctgattttgacaaaatcaaagaggatcagaatttctatatagacgatgcgggacggatggttctggtttttgatgagtatgaagttgctcccggatttatgggaatcgtagagatcacgataccggaaacaatttaccatgcggacggactgtaagaataaataaaaattccgcagagcgctttttaccgtcgaggagcctgaagtttttgttgtatacaggcaggcaatatgatatcatgatctcagaaaatgtctacagaaaagaggagtttctaatgaaccgtccgatttaactgcaattttaacatttcatcagcagcagacgtatttcgatgatggagataagagtgatgacctgtgcgcgtagcgtgcaggttattgctgttgtgtttaaaattacaggggacagtttattatgcgaataaaaaagaatctggtgatcatgtatgcacttgcctgtctgcatggcatggtgttctatggcccggttgcagtactgtaccgtcaggcggcaggtgtatccgtctttcagacagctttgattgaaagtatttctcttgtgctgaccgtgctgcttgagcttccctggggaattgctgcagacagaatcgggtaccggcgcacattgattatctgcagcgtcttgttttttatatctaaaattattttctggagggccgacagctttggctggttcctggcagaacggctgctgcttggcatagtctgtgcaggtatgtcgggcgtggatgccgccgtactttatttatcctgtgaagacggcggggcgcagaaggtttttagcatatataataactggggcatggcaggacttctggcagcatctgcggtttattcagccgtgataggcgaaaactaccgccttgccggtctgatgaccgtgttcagctatggactggggcagtactggtctttggacttcaggatgtgaaggggcaggagagcagaacacatactgtgcttacggaggggccgtatttatggaaaaggctgttctttaataaaaatatattttttctgcttttagcatctgcattgttaagtgagacacatcagacgatcaccgtatttttgaaccagctgcaatttgtccgttccggtatgaatgccggtatgattgcagcggtatatatggtgatgacgttatccggcctgctcggaggtgcttcggcccgggtaacagagcggttcggcgtgcaaaaaacgggaacggcattatttctgatttgcagcatcgcgtgctttattctggctttaacatgccggatgggaccgtcaattgcagccgttttgacactgcacatcagccatagtgtttttcaaccgctccagatggaactgcaaaaccgtgtaatcaataccggtaaccgcgcgaccgctcttagtttcaatgcggttatcatgaataccacggctgtattaataaatcttattatgggcaaagcggcggaatcggatctgagaatttcaatggcattgggcggcgttttctgtacggtaggatttgtattgtttcagttatatgaaaaaaaccggaaatagaagcaatagaaaaaatggaagcaatagaagaagaggacagcacggttcagtaatgtcgagggccggccggtgatagccggccggccctggttgactggattgatggcgttgacgcggagcgttcaggttaccgcttacagactgtccgccatctcatacaggagacgctcggaatcatcccatcccagacacggatccgtaatcgatttcccgtagcagtgctcatcaactttctgacatcctggctcaatgtagctttcgatcataacacctttaacaaaattgcggatgtcatcggagtggcggcggctgtgaagcacttcttttacaattcggatctgttccatgtactgtttattggaattagaatggttggcatccacgatacatgcaggatactgcagatcacgttccatataaagctcgtggagcagctttaaatcttcaaagtggtagttaggctggcactggccatgcttgttgacggaacctctcaaaatagagtgggtcagcggattgcctttggtcttaacttcccagcttctgtagatgaattcatggccgtgctggcctgcgtggacggcattgagcatgacggagagaccgccgctggtcggatttttcatgccgacaggcacatcaatgccgctggaaacgagacggtgctgctggttttcaacagaacgggcgccaactgctatgtaggacataacatcgttgaggtaagtcaggttttccggatacagcatttcatcggctgtggagaagcctgtttcctcaattacgcgcatatgcagcttcctgattgcgatcaggccttcgtaaagatcgggctttttctccgggttcggctggtgcagaagccctttatagccgtcgccggtggttcgcggtttgttggtgtaaatacggggaaccagaatcagtttatccttcaccctgtcctgaactttggccaggcggttaacgtaatcgcatacggaatctgccctgtcggcggaacaaggtccgatgataacgaggaatttatcgctttttcccgtaaatacatcccggatttccgcatcttttaccgccttgactgcggccagttccggcgccagcggaaactgttcctttatctcgtccggtgtcggcagtttgctgacatattcaaatcccatggctttctcctcctgcaaatcgtaagctattcgtaacgaaaattctattgtaatttatatgtgcgtccattataatatagaaattccgattcggcaagaggccgcaggctttttgctgtttctgtgcattgcaatacaaataacaataaaataactgacaagggagatttaccatgaaaaaaagaacactgatttttgcagcggcggcactggcagcgggcctcacggcctgcgcaccaaaggcaggggagacacagccgccagctacgatagaggagacacaggaaatgacacaggaaccagccacggaagacagtgatgagccggagacacaggagccgggcggtacggaaaacggtgagacatcagacggcggagcaggcgagacggctcagatctcggatgaactgctgggaaaggtttatacggctgtaaaagaggcatacggtgagaaatatgtgccaggcatgatgtttgacgaagccatgctggaaggaacattcggcatttccaaagaccagtatgattcctatgtggccgaaggcccgatgatttcggttcatgtggagacatttgtcggaatcaaggcaaaggaaggaaaggccggggatgtggcaaaagagctggaggcatacagaaagaaacagattgaagaagctgtccagtatccgatgaatatgactaaactggaagcatcccaggtaataacgcatggagattatgtattctttgtcatgctgggggagccgatatggaggcggaagagcagggtgcagatgcggcgcttaaatctgcgaaagaaaataatcagattgcggttgatgtaatcgccggttttttcaaatagcgtaataatataaaataaaatgtaaggagagccggatatggtattttcaagtctgttattcctgttccggttccttccggcagcgcttttagcatattttgcggcaccgcgcagataccggaacggaatactgtttgtttcaagcctgatattttatggttggggggagcctgtgtatattctgctcctccttttttccaccatcgttgattttattcacggaaagctggtggaccattataaacgtgagggcaatttgggaggggcgaagctagctgtagcttcctccgtcctgatcaatctgggtcttcttggaatcttcaaatatacggatttcctgatcggcgcattcaacactgttacggggaagggagtgcctcttctgaatcttgctctccctatcggaatttccttttacacattccagacgatgtcttacactattgatgtatacaggggtaaggccggagtccagaccagcattatcgcattcggcgcctatgtttcgatgttcccgcagctgattgccggtccgattgtccgctacagtacgattgccggggaactgacaagccggaaagagaccttggccggtttttcagaaggggccgtcctgtttgcagcaggtctggggaagaaagttttattcgccaatcagctggggcagatatggaacgagattatccatattgttccggaacagagaagcgttttgatggtttggatcggaattttcgcctttggaatgcagatatatttcgatttttccggatattccgatatggctctgggactgggacggatgttcgggtttcatttcccggagaatttccactacccctatgaatcgaagagtattactgagttctggcggcggtggcacatttccctgggaacctggtttaaagagtacgtctattttcctctgggaggcagccggtgcaaaaaagccggacagcttcgcaatatcctgattgtctggctgcttacaggaatctggcatggcgcgggatggaatttcctgctatggggattatactttgccgccttccttctgttagaaaagtttttcttaaaagagagactggaaaagtgcccggccttcatccgctggctctacgcaatgctggctgtctttatgggatgggtgctgtttgctttcgatgatatgcaggccgggcttctgtatttcagacagcttttcggcgcggccgggcttagcctggtaaatgaaagaacgctgtatattctgtttacgaacctgattttgatggccgcagcggcaattggggccacttccctgccaatcgctttctgcagggagcatatacagaaaaaatcactgccgatattggaaccgatctttgttgccgcagtgcttctggtgtctacggcttttctggtaaatgcaggatacaatccgttcctgtatttcagattttagggagggggtaagcattatgcgcagagaaataatgacggcatcggcttttataatccctctggctttactgtccgtcttaagcgccgtcatgccccagaaggcattctcggaggaggagaaccggtatctggcgcagaaaccggttttcacgatagaatcgtttaaagacggtaaatttggtaacgactatgagacatggctctcggatcagttcccattcagaaaaacctttgtggctgccaagacgaacgcggacagactgattctgagggaggatgtgaatgatgtctattttggtaaggatcattattatatagaaaaaacagacccggaaaatctgctgacacctcagctttatgagaatctggattatctgtcggacgcagccgcacagtttaattctatggttggggcagagcatgttaagatcatgctggttccttctgcatctcagattctgaaagataaactcccgccttttgcggctcctgccgatcagagtgaagcagcacggattgcacgtgataaaatcagggataaaacaggggaagaaggcaattttctcgatattgaaggcacgcttttaaaggcatgggaggaatgccgtaaaatagcgtcggaatatcaggctggcgaagagcagctttattataaaaccgatcaccactggacaacgctggggcctggtatgcgtaccggctgtatgggcgggaggcgggatttgaaccgtggggaagagacaggtttacagagattgtagtatcagacaatttccagggaacaattcagtcaaaactgggagtggctctggttccggataccattactcttttcattccgggcagccccacatcggtaaacgtatattatgacggattgccgaaggcctatgacactttgtataataagaaagcgcttgaaaaaaaagatcagtattccgttttccttgatggaaatcacggtttaacaaaaatcgtaaataatatgtcaggggtggaggcaaagggtaaaagacttctgataattaaggactcttatgcacattcctttgcgccctttgtcatcaatcattttgaggaggtttatatgattgatctcagatattttaatatgaagccggccgagtttgcaaagagccgggaaatcacggatattctggttctttatcagataccaggatttgcaaaagacgggaatctcttcaagatggtccgctaaaacttgacggattggcgtttttctactaaaatagactatatcaaaaaaaataaaaatttttttggtatacgtgcaataaaatgcgcatgtggtgcattaacttattgaacggatgaaaatcatttctgtttgggagactgaaagcggatgggtaacaacacaaatatcaagttactcgaaattccttgatgcattacactccgttacgattctgccgacggcagtaccttacagaaaatcatttcaacagcaggttgacgacaaccagagcctgccgttgagtaaaaaagaaccggactgaatttttcagtgccggtcttttttatttcacaggagtactttcctatgaaataaaaaagaccggcactgcggcggagttaatcctataaaattaaggataaaatatattgactttttggccaaaacaggatataaatgtcaggcatggtttaacctgccgtgcattattaagcgggaatacgtaagaatgatataaaaggcggcttgaaatgaaaatagaaaatgatcttggcaaggacgacataaagcgacttgtcatcagaatagccatcccttccatgctggcccagtttgtaaacgtgctgtacagcgtggtggatcggatgtacataggaaatattgcagagattggagagaaggctcttgccggagtcggcgtctgcggacccatcgtgacgatgatatcggcgtttgcctcacttgtgggaatcggcggttcgccgctcatgagcatcaagatgggagagggcagcgagaaagaagcgaaaaagatactggccaacagctttctgatgcttgccgtgatttcggtcatcacaacggccggggcgctgctattgaaaaataatctgctgatgtggtttggcgccagcgagacaatctttccgtatgcgaaccaatatataacaatttatctgctcggcaccatttttgccctgatggcggtggggatgaaccagtttattatctgtcagggatttgcgaaggtgggaatgaaatccgttacactgggagccattattaatattattctggatcccgtatttattttcgtattggagatgggggtccggggagctgcgctggcaacggtcctgtcccagatggcgtcctgtgcctttgtactcctgttcctgttcagcaaaaaggttccgattcgaatcagctttggcggttatgagtggagaattatcagaaagataacggtgctgggaatgacgccgtttctgattattgcctttgataatgtgctgattatcaccttaaacgccgctctccagcattatggcggagcggagggagacaagcttctgacctgcgccaccatagtgcagagcttcatgctgatggtgacaatgccgctgggcggtatcacgggaggtacggagccgatactcggatataatttcggggccaggcgtaccgaccgggtgatcagagcccagaaatatattgcctgttttgccttggtatttacttcggtcatgtttatagcttcacagaccctgccccattattttgtcaggattttcactcataatgaagaatatatttcattgactgtctgggcaatccggatttatacggtaggtatcatcccgcttgcactccagtatgtggtggttgacggatttaccggaatgggagttgcctcggtcgccatcttcctgtccatgttcaggaaggttctgtatttgggaggcgtctttgtacttcctgtcctgtttggcgtaacctcaatcttttataccgaggctatctcggattttggcggtacggtgatgagtattgccgtgtatattgtattaatccggaagatattgaacaggcgtgaaaaaggagaactttaagaaaagataataatttattcggcaaaaggcggcagagggaaatgcaaaatacattttcatctgccgcccgtttatcattgatttatattcagcgcatatcttctacaagaagtatcctgattgtgtctggtgacgggttccagttcataacatataaggtgtaaatacggttaggattgaggttaataaaggtagagagcaggttgactgccggtctggcggatcttgccacgtttacggagtaagttcctgactggagcctgctgaagcttccggcgtttccgggctgggtgttggtgaagctcatgaaagcattcggcagcgttacattgacggcgccgcttgcataggccaggttgcagacccgcagacaggaagtattgaaggatgtgttgcagcctccgtccgggaaggcgttgatggccatacggttgttgatgcttacaatggcaatcgtagagttatacccaaagaacatattctgctgaaggtagacaaggccgttcggagccatgattgtaattctgtgaaatcctctggaatactgtctgtagcggctgacctcggcaaaatccatgttggtgagaatcgtcctgttatcgacctgtatggtaagatttgaatgtacgggcgaagcatttaaaaaccggatgctgaagccgcgtgtcggctgcggcataggaagacagttaccacaagggataacaggtcccgggccgcctggaaaccatacgggaggaacggagaagtccgggtcgatcacgccgttgtcgggcataacggagaaatccggatcgattacgtcgttgtcggggaaaacagagaagtccgggtcgatcatgttgttgtcgggcataacggagaagcctggatcgaccatgttgttatcgggcatgacggaaaaatcggagtcaacgcctctgttgttttgcgcgccgttaaaattgtcattcacattgagggtgtgaacatccggcatctggttcatttcatgtagcatatcatacctcgtttattaagtgtttatagtaaaagtctattcaacggcgctgcaaaatgagcatggacgtcaaatatagttgtgtttcggcctttaaatgctccgacaaattgccacaaagttcgagtctgtttacctgaaaattacataaattttacatattttacaaaaagcttgaaatagctattttccctgtgatatgataaaaacgatcggcttttaatccggcaatttttctgctgtaaaaaagccggcacaggaggatatttatatgtcaataaatgatgtaagcaatctgtttacatttgccggagggctgggcatgttcctgtatggaatgcgcatcatgggcgacggcatgcagaagacagccggcagcaagatgaaccactttcttgggatggtgacaaacaacaggcttctgggcgtagccctgggagctttaattacggcaattcttcacagcagcgcggcgacgacggttatggttgtcggttttgtcaatgctgggattctgaatctgacacaggcggtgggcgttatcatgggcgctaatatcggtacgacgatcacggcctggatggtttctttaaatcagctcggagacgcgtttaccgtactccagcctgcattttttgcacctctgtgtatcggcatcggtacattcctgattgtattttcaaagagacaaaaaaataatctgatcggagaaattgtcataggcgtcggacttcttttcgtgggccttgaatttatgagcaatgcgatcaacccctatacggatgctcctatatttgcaaaggcatttgccgtcatggggcgcaatccgattctgggcattatcaccggcgcccttgttacggctcttcttcaaagctctacggcatccgtaggtatcctgcagacgctggcgatgaacggtgttgttacaacggggcggccatctacataaccctcggacagaacatcggaacctgccttaccgccatgctttccagtgccggggccaaccggacggcaaagagggcggcggcaatccatctgacctttaatacgctgggtgccgttatatttggtgtggcgatgtacgcgctgtcactgctccggcctgccatggccggttcggagataaattccgttcagatttccatgttccatacgatattcaatgtgacgaacactcttcttttatatccgtttgccggacagctggtgaagatttccggcctgctcgtgaaggacggagaggccgaaaaagaggcgggagaagaacggggagagatcgagaccgcattccgccacctggatcagcgtatttttgaatcgcctgtttttgccatcgaggtggctcagatggagactgtgcatatgggacagatagccctcaataatatccgtctggcaacgaatgccattttgagcagagataaggagaaggcgaaagaagtatacggaaatgaaaaagatatagataaaatggaggagctgctgaccggttacctcattaaagtcaataatctgtcactgacggagcaccagaagctccaggtcaataatctgttttacagcatcagtgatattgagagggttggcgatcactgtgagaacctggcagagcaggccgactatatggcggagcataatgtatcattttctgatacgggaaatgaagatttgagcgccatcagtgagaaagtggtcaaatccttcacccacgccatagccgccaggcagaccggcgatatggacgatgttaggaaggtcagccagtatgaggacgatgtggacatgctggaggaagaactgagggataagcatattgagcgcctttcgagcggtcagtgcgatccgtcctccggcgtcgtgttcctggatataataagcaatctggaaaggatttcagatcatgcctataatctggcaggatatgtgaaagatgagatatagacaggagaaagtttataaagacgaaatgagaacacccgatggaagatgatattacctccatcgggtgttctcattataggaaacattactgcccatccagataacctttctcaagataataccgttcggcccccttatggagcggaacagccagttcattgcagataaaccccttttgcgtcaggctgctcagagattcgtggctggcggccagctgagggatggattcatccaatatctttgtaatacggtaaacgagttcctcgtccatattctcatctacgcagagaagacatttgataccgaaggagtcgacatcctcactctggcccggatacgttcctgctggtatggttgttttataatagaaagaattctttgaaagaatcttcttaagctctgcaggcgtatatttcaggagccggcaggggacagactctgcaagttctgtaagtccgctgatgggaactccggcaaacccgtgtactgcgtcgagttttccttcccggacagcgacggagccggagccgagcccggaattgaccagagtggtggatgatccgagtccgaccacatcaatggcaatacgggcggacagatcggtggttgaaccctggggtccgatggctgcgcttttaccgttcaaatcgtggacataagtgagccctgccgattcgggcgccatccaattggaaacactggtataaatggctccgatagccctcaggcttttaattggtttatcggcaaaatcatcggttccgtaataagccgaccaggccacatctccgctgaccaggcccatgtcaatctgtcccccgtaatccattcgacattggtaaaggagccgtttgaagcgctgagattgaccttaatattagagtcgtgttcactgattactttggcaagcgcattgccgaccggatacatggttcccccgctgtcggcggttccgattgtaagaaccgtcagcccggtgctcacctccggtaaattttccactttttccgtcaatgccgggttgtcggacgtattggaggaacagctgcatgcagtgcaggcaaaacccgtcagtgcagctaataagaaagcttttaaatatacctttttcattatacagatcacctgttttattaaagtgttaaacacagcagtcacatgtaaacattataatctaaaatggcgccggatcaataccttaaccattgaagagaaaatatacaaaatctttacacttatattctactataacacaggtgtaaagattcgtccaagacaaattgttttgcgaagactgggatgttgctttggcgcgggatgaacagcagcattggaagctgcgcttgggcagggaaacagaatcgggattgatatgaaaaaacgtccggcagattgggggcgccggacgtttaagtgaatttattattagtaaatgaacgtgaaccttatttgataaagcttccgaatacggaaaggaagatagggttgtaaatatcatcaatgattacggcgaaggatgggtaaagaacccatgcaacattgtgccatccgtattcatccataacagctttctcatttgctacggcgttcggaccggagccgcatccccatccgcagtttccggcagccataacagcagcgccatagttgcggccaaacatgttgtaggagacgaagattgcaaatgcagccatcaggagggcctggcagagaaggatgatacccatctgacctgctacaggagccagctttgtaatatcggttgtcataagaaccagagcgaggtagagttccaggaacatatgctcgattgcgtcaacctcaggaacataaaacttgatgttgcaggcctccattacattacgcgcgattgcgcctgcaaacagacagccaatgaatttcggcatttcaatcattgggatattgtcaaggatacagtaaatcggcataccgagagcggcaatcagcagagtcatggcaaacatggaaatcattctgccgttgtcaagtgttgcagccgtaccggtttttgctgattcgggtttatcgttcgggtcggatttcaggttgttgcgcgtaatcaggaaggcagccacaggtccgccgattaaggaacccatgatgttgcccattgtacctgccgccacaccgatagtagtggcatccggcgcgccccaggactcaaagatcgggccaaatgcggaagccgtacctacaccgcctgacattgctgaagaggaacactgcagcgccagaagcggatgaagtccaatcaggttgccgacaaacacgcccagaagatcctggagagtgattaaaagacaggcagcgattgcaatcatggcacagagcttgccgcctgcatgacgaagcatctttaagctgaaaccgaaacctacgcagaggaagaacaggttctgacataagtctttcattatcgtggcatcgaaggaaagtccgatgatgccggaacccttaataatagcgacaacaattgaaaagatgataccggatacaaccggtgcggggattgcgtatttacgcagtaattttgagtggtttacaatcgcacgccccaggaagataacgatggcggcaaaaccgagagtggtaagatactcaaatttgaaattagcaacagccccatctgccgccggtgtgtaagtaccgaaatagcccataatagtttccattgatacataccctccatttcttttttataaaatttatttattttttataaacaaagtgtaaaatatgtaggaggtgaagtcaatttttgtaattaagaaaagcctttagtaactatagtaaatgggttttggatgtatattctgacgaaatgggggaagagagaaatattgactgataaagaatatggaattgctgcagcctgaaaatacccaaaagtgcagcagcgccggaccgttacggcagaaggcggccgcggctgcacacggggtttatggttgattgcggtgttctgtgcgcggaatgtgcagactgtcatttgttaatatagcggtatcggatggaaggccgtcctcctgtctggtaatcaatggtactgatcagctctccggtctccagcatataattcatataccttcggattgtgatacgcgacaggtgaatctgctctgctatctgttcactggaatactggacatccctgttatccttcaggaaaccgcgtatcagtcccagtgtggtttcgttcagccccttggtcaggccggcggcctgggagccggtattctcctgacgggccagcagcttatcaatctctccctgccccatgttgttttttgcctggtttaaatactccttcatctggctgtatttttcaagagcggcttggaaacgcgggtattcaaacggttttacaagatagtcaatcacaccgcgggacagaagctgtacgacgatatccgtgtcgctggcagaggtcaccatgatgatggacggggctttaccggttgcatgaagccggtcgatgaattcggcgccgttcatcagcggggtatagtaatcaagaataatcaaatcgacatcttcatcattcagatactcaagcgcttcaattccgcttttaaagacctttatcacccggaaggacggggtcagttccacatactgcttattgatggaggctaccatcggatcatcttctattataataacctggtacattaaaggttctcctttcttgtgaaagtgagcgtaaagcaggtgccctcgcccatctccgtatctatggaaatttctccctgataatcttctgtaatctgtttaatcagataaaggccggttcccctgttttccccctttgaggagattcctttatcaaatatatgattcagcagttcctggggaattccattcccggtatcctcgcaggtaatgatattgcagtcggggcggcagtaaattccgagagtgatttcttttaactcctgatttgaatttacagagctgttcagctcctcgatggcattttccagcaaattccctataatcgtaatagcggaatcctgcaaaagcagcagttcactttcgatgcagctgctgtcatgggtcaaagtaaggcggattccgagttccgcagcatgcatcattttaccgatgacaagcgcacagattctggatacacggatggaatcggctgtttcccggatagactggctggacaccagattactgttgatgataaattgttttgcctgatcgatttcacccgtctgcagataacctaggattacatgaagcttgtttagaaattcatggttaaaggcgcgaagcgtatcaagcatgctgcgggtgccggtcagctcgtccgacagagagagaaactccgtcctgtccacagcgatggccagcatgccctgtatgggttttttgccctttccctgaatcggtatttcattcatcagaatggtccgcccgactatggagcatgtctggcgccggactgatttaccggtgttgatgacagtgtcgaatttggtgtcaggatatagctcacggatatgcctgcccatcaggggagggccctcgccgggaccgtccgaaaacaggtttcttgcaacgatattggagaaaaggatttttccgtctgtatcggtggctatcagtccttcttctatagaattcatcacatcatcctggcgtatatacatattgagaagctcatgagggttgaagcccatcagagattttctcagaaagcggataaatgcatgggtaaggaatgtactcacgagcatcatcagaataaagatagccaggtgaactatcagtatgttacggtgccttgccgatatatgggcggtgaagacagaggccatgacaaaaccgatgatagtcccgtcactgcttttgaccgcgtggaatgcacgcctctgtgcgcctttggttccgtagccggttgtgatataaggctcgctcccctgaagaatccgggtctcgtccccgtcaacgaaggtttcgcctgttttcagccggtccgtgtggtaaaagcgcaggctgttgctgtcacagataacaacgacgctgatatcggggagattattgcagagtgaatcaatgtcctgttttgcgagagcgctgggataacctgcctccagcatggagacaacctggggcatcgaggcaatataggaggcggtgccgcttatggtggcgtccatatccgccctctgccgcgtgatatcaaagtacagggtaatacccagtgaaaggacgataattaaagcggaaagcagtgtaaaagagcggtacagcttcttttcaagctcgttccgggatgctgtctgatccaagatgcacctcctttagcagtttgacggtgaaaagtccgcaaaaagatgtgcggacacttaatcatgcttcattatattaaaaaaagaaggttttcgcaacagcaatcaaaagtccatggatgaaaacagagagagcgggaataatatttatgaaatttcaaaaaaacccttgctattttgggattaattggttacaatacaaggtaggttgattattatttaacaatcatgaatagaatatattcttaggaggaatgaaatcatggcagtaaaagttgcaatcaatggttttggccgtatcggccgtctggcattcagacagatgtttggcgctgagggttacgaggtagtggcaatcaacgacttaacaaacccaacaatgttagctcatcttttaaagtatgattccgcacagggcagatatgagggacatactgtagaagcaggcgaagattacattgttgtagacggcaagaagatcacaatctacgctaaagctaacgctgctgaacttccttggggagagatcggtgtagacgtagtattagagtgtaccggtttttatacatcaaaagctaaagcacaggctcatatcgacgcaggcgctaagaaagtagttatctccgcaccggctggaaatgatcttccaacagttgttttcaatgtaaaccatgacatactgacaaaagaagatacaattatatccgcagcatcctgtacaacaaactgtctggctccgatggctaaggcactgaacgactacgctccgatccagtccggtatcatgtcaacaatccatgcatacacaggcgatcagatgatccttgacggacctcacagaaaaggcgacttaagaagagcgagagcaggcgctgtcaatatcgttccaaactccacaggcgctgcaaaagcaattggccttgttattccggaattaaacggcaaattaatcggttccgcacagcgtgtaccggttccgacaggctccaccacaattctcgtggcagttgttaaaaaagccggtgttacaaaagaagaaatcaatgccgctatgaaagctgctgaaacagagtccttcggttacacagaagatgaaatcgtatcctccgatatcgtaggcgtcagatacggctccttattcgatgcaacacagaccatggtttcccagattggcgatgatttatatcaggtacaggttgtttcctggtatgacaatgaaaactcctatacaagccagatggttcgtacgatcaaatacttcgcagaattatcataatagacagacggcacgaaaatcccgagtttcacggcgcgaagcgatgttttcacagcattgccgctttttggcaaaggtgtgaaaagtaactataaggattcaacatgggtccggtccacaggaccggacctgtttttgtttttagtaaccggtaaactctttcagttaagaaaggagtatcttccatgctgaataaaaaatcagttgacgatatcaatgtaaaaggaaaaaaagttctggtgcgctgtgatttcaacgtgccgttaaaagagggaaaaatcaccgatgagaaccgtctggtggcagcgcttcccactatcaaaaaattaataggcgacggcggcagagtaattctctgttcccatctcggtaagccaaagggcgagccaaagccggaactgtcgttagcgcccgtagccgtgcgtctttccgagctgcttggccaggaagtgaaatttgcggctgatcccgaagtcgttggtccaaatgcaaaggcggccgtagacggcatgaaagacggagatgttgtattacttgagaatacacgttacagagcggaagagacaaagaacggagaggcattcagtaaagatcttgcttccctctgtgaaatttatgtggatgatgcatttggaacggcgcaccgcgcacactgctccaatgttggcgtaacccagtacgtttctgaggcggcagtcggatacttaatgcagaaggagattgatttcctcggaaatgcggtgaacaatcccgttcgtccttttgtagcaatccttggcggagcgaaggttgccgataaattaaatgttatttcaaatcttctggagaaatgcgacactctgataatcggaggaggcatggcatttacgttcttgaaggctcaggggaaagaaattggaaaatctcttgtggatgacacaaaactggagtactgccgtgagatggtggagaaggcggagaagctcggcaagaagctgcttcttccggtcgatgccgccgtggccgtatcgttcccgaatccaattgatgctccgattgatatacagtatgtatccgttgatgctattccggcagacacgatgggactcgatatcgggacagaaactgcaaagctttatgccgatgccgtgaaatcagctaaaaccgttgtatggaacggaccgatgggagtatttgagaatccggtactggcgaaaggaaccatcgccgtggcagaagcgctggctgagacagaggctaccacgatcatcggcggcggagattccgcggcagccgtaaaccagcttggattcggtgataagatgagccacatttccacaggcggcggagcctccctggaattccttgaaggcaaagaactcccgggtgtggcggcggcaaatgaccgataatgacaggcaagtgaggccgtgcttattttcaacagtttttaaaatcaggaggataaaataatggcaagaagaaagattgtggcgggcaactggaaaatgaacatgactccgagtgaggcggttgcccttgttaatacattaaaaccgctggttgcttcggatgagacggacgttgtcttctgcgtaccggctatcgatattatccctgtagcggaggcatgtaagggaacgaatattgcagtaggtgcagagaatatgtactacgaagaaaaaggcgcctataccggagagattgctccgaatatgcttacggatgccggtgttaaatacgtaattatcggacattccgagagaagagaatatttcgcagaatcagacgagactgtgaataaaaaagttctcaaggcatttgagcacggcctgacgcctatcatctgctgcggcgagactttaacacagagagagcagggaattacgattgactggatccgccagcagatcaaaattgctttcttaaatgtgacggcagaacaggctaaggcggccgtaatcgcatatgagccaatctgggcaatcggaacaggaaagacggctacaacagagcaggctgaagaagtatgcgccgcaatccgcgcatgcatcagggaaatctatgatgaagcgacggcagaggccatccgtattcagtacggcggttccgttaacggcggtaatgctgccgaactgtttgcccaggcagacatcgacggaggcctggtcggcggagcttccctgaaagaagaattcggaaagatcgttaattacaaataataagattttgatatttaggagccaaccggccatatgacaggccggctggctttttttgatggcggtgacctgtgcgcggagcgtagtacccttccttgagcagcggcattgaaaccccgtatttgctgtgctataataaataatcagggaacaatgaaattacttgacttagattacatctgaaaggggacagaacacatggacagaccggttaggaggctgcgtatggagcatggccttaatataagggatatgggtggattcgagacaaacgacggcagggtaacggcttttgggaagcttctgagagcgggagcgcttcaaaagctgacaccgcaggagtggggacggctgaaggagtatggagtgaggacggttctggatctccgcagcctggctgagatagaaacgggcagggacgcagtacccgagggcgtggagtggtaccactgtccgttacagagagagcagatagatgcaaaggacataaccggatcggcggaacgggcgtttgccggcagtctgacggatggatatttaaatattgttaaaaccaacggagcgcttttagcctcggcggtcaggcagctaattgcaggtcttgaaaaaggggcggtcctttttcactgtacggccggaaaagacagaaccggaattttggcatcctgtattttcactctctgcgggatttcccaggaagatattgtcgcagattatgaggtgacatatacatataacaaaaaagggatgaaccggctgctccggatgcttgatgaagagaccagaggcaggatggaaccgcttatgagatcggatgcggagagcatggaacgccttcttgctttttatcaggagatacgtctctcaaaatatctggaggcgtatggtttgacagaagaagagatggaaactctgaaacattattttctggtataatcaaccggtacggtggatgcaggcggtttccgaatcagggaggatacgcgtgaaaaataacaggctttttaaaacgaatgctgtaatcagcttaattttgctcattggtttcgccctgacggcagcactttcttaccacgctaattacaggacgtctcttgacagtatggaacagatatctacactgacggcagacggtatctgctatcagctgacagctatgtttacgaagccggtcaatgtttctctgaccatgtcccatgacagtctgctgcgggaacatctttcaaaggagacggagtatcttgaggatgaaaaatacgttgacacaacgagaaattatcttgatacataccgggaaaagtacggattcgattccgtcttcctggtatccgccgccacgtcccgctattataactttaatggaattgaccgcgtattgacggaagacagcccggagaatgcatggtactatgatttactgaaaagcgatgccgaatattcgatgaatgtggacaatgacgaggtggaaggcgccgacaatgtgcttaccgtctttgtgaactgcaaagtgaaggcgggggacggctccatcctcgggattgtcggtgtcggaatcaggatagattacctggaagagctgctccggacgtatgaagataaattcaatgtcacagcaggactgctggggaagacggaaccatagagatctccactgcccacaatgggcatgtgaagacagactggtttgaacttaacggccgccataatatcagggggcagatacttgactggagggaaaagaatacaaacctggaaatttgggcggacaaagaagaaagcggaaaggaaaggagctacatcgtggcccggtatattccggaactgaactggcacctggtggtggaacagaatacgggccagctgctgcatggaatccggatccagataatcctgacgggaatcctgctgattattatcgtcgtgtcggttcttctcatcattaccgcagtaatcaggaatttcaacaagcagattacagagctgatggaggaacggcaggaaagctttgtcagagccaccgaacagctctatgataatatctatgagctcaatatcactaaaaattgcagtgtcgggaaaagaacgcgggagtattttaaaagtcttggcgccaacgatctgccgtacagcgagggtctgcgtgtcattgccgataagcagataaaagaagagttcagggagggctatgtctcgacctttgatccgcccaatgttatccgggaatatgaacgcgggaaccatcatctgcgctatgatttccagatgtcggaggacgcagataagtatttctggatgagaatagatgcctacgttttctattcggcggaagatgactctattcacatgtttacctatagaaagaatattgaggaggagaagaaaattcaaatccaggccgtgctggatgagatgacccggttctacagtaaaagggaaacggaacgcctgatcgaaacagtactttccgggacaccgggcggaaggtatgccttttttatctttgacattgacaatttcaagcaggcgaatgattgctatggccatcggtttggagatttttgcatcaaagaattcagcagtatcatcagaaaacatttcagggaaaaagatattctgggaagaatcggaggcgatgaatttgcagcctttataccggttcccgatatcggatgggcgcggaagaaagccggtgagctggcagaagcgctgaatacggttattgagaatcaggacaggagctggcagatgtcggtgagtatcggagtggccgtttacccggaggcaggaacactgtttgaagaactttacgggaatgccgataaagcgctatatgaaactaaaatcagaggcaggaacggatttaccatattccagccttatgacgagaaagggcaggagacggagctggaaaatgaataaacagcacgccgtttttggcgggatgtgaacagtaaccgtctggaaaatttcgtcaaaaatttgtcatacagccattgaaacttgcaatgaaatcatgtaaaataagaaattggcaagaataatataaatgcctcctgttttacctgaatcactgcagtttcgatggttttattaaagacggcgatccgtgggcggagcgtgcaggttatcgttcaggtataaaaggagaagaagataaaggagatagattatgagcaaaaaaccaactgtattaatgatacttgatggttatggactgaacagcaactgtgagcataatgcggtttgcgaagcaaaaacgccggtgatggatcagttaatgagccagtgtccttacgtgagaggcaatgccagcggccttgccgtgggtcttccggacggtcagatgggtaattccgaggtgggacatctgaacatgggtgcaggccgtatcgtatatcaggaactgaccagaattacaaaatctatcgaagacggagatttctttactgtcccggaatttctggaggcagttgagaactgtaaaaaaaacaattcggcgctgcatcttttcggccttgtctccgacggaggtgtccacagtcataatacccatatttacggactccttgagctggcaaagcgtaacggcctgacggatgtatatgtacactgcttcctggacggacgcgatacaccgcctgcatcgggaaaggattttgtcgccgggctggaggcaaagatgaaggaaatcggcgttggacgcgttgcctccgtaatgggccgttactatgcgatggaccgggataagaactgggacagggtaaaacgtgcttacgacgttctgaccaggggagagggcgaaaaggcggataccgccacaggcgggatccaggcgtcctatgaccgggaaattaatgatgagtttgtcgtaccttttaatgtggaggaaaacggccgtccggtagctgtgattcaggacgaagattccgtgattttctttaacttccgtcccgaccgcgccagagaaattacaagagcattctgtgacactgattttaacggttttgaaagagacaaaaaactcgatttggtatttgtatgttttaccgattatgatgagaccatcggcaataagctggtcgctttcaggaaagaggagattacaaacactttcggagaattcctggccgcccatggaaagacacaggcaagaatagccgaaacggagaaatatgcccatgtaacctttttctttaacggcggaattgaagagccgaacgcaggcgaagaccggattctcgtcccatctccaaaggaggttcctacttacgatttaaaaccagaaatgagcgcaccccaggtttgtgataaactggtggaggcaattaaatcggataagtacgatgtgatagtcatcaacttcgcaaatcctgatatggtaggccataccggcgttgaggatgccgcgatcaaggcgattgagacagtggatgcctgcgtgggaagaacggtcgaggcgataaaggaaaccgggggtgtcctgtttatctgtgccgatcacggcaatgccgagcagttggttgattatgagacgggcgagccctggaccgcccatacaacgaaccaggtaccgttcatccttgtcaatgcagatccttcttataaattgagagaaggcggatgcctggccgatattgcgccgactttgatcgaactgatgggaatggaacagccgaaagagatgacggggaaatcccttctggtaaaataatgttgtgatgttggggtcaaaaggtcttttgacccctttatgctgtaacgcccggctgtaaatgtctgtcatacatttacagccgggcgttatccgacagccgggttaattcagtgaatccttttcataaagccggtggtatatctcttcgctgacggagtcaacgtatgcctgattgggaagatcctgctgcgtgacaagaaaatcctgtatcagctcaaaacgcttcagttccaattcctcgcctgccaggcccggatcttctttcttaagctcttcatcgagggaaccgccggtccatgtggagataaaccattcgattaaatcctttgtacatctttcttcctcttccgcctgtttttgcactgcagcgatggagctgcgcgtccgaaacgagacaaaaagacaggcgagtcctaaaagtgtgatgacagactggaagaaaattctggaaccgcctgtcatcggaagactgataatcccggcccagcagacagcggcaaacacggttgcggcgcctcccaccatcaggaaagcggaactggaggaatggagatcctcgcatctttgacggctgcttatatagacgcctgaagaggctgctctcgtcccggactgaccggacggtttcgtatcagccggaataccgttctgctgcggttcactgtcatggcttaaaagggcttcaaaattctccaggttttccagattggccaggttgtcaaaatcaaccagattatccagaatttcggaggcgtcaattccatccgtctgctgatagcggccggaagcggcatctatctgctgctgtttctttttctcacgcatttctgcctcataagcttcctgtgattcaacaagatcgcctccgcagtcgctgcacgttgtgattccatcgacaaattccatgtcgcatttcgggcaataaggcataataggttctccttggtatttaatatagatttattataagatagaaaagatgaaacgtctacactaacgtcataaataaagtacttccatttatatagaaaataagatagaataaaaagggcgttccaaagaaggggagaagaacttatgaaccggatgaagacgagtgaattgatgaagcgtttcgcaccttactatttcaaatactggaaggcactgctgtttgatttgttctgcgcggcacttacgacactgtgcgaaattgtgcttccgctgattctgagatatattacaaatgaaggcatgtataatctggcaaatctgactgtaaaaacgattgtcaccatcggccttctgtatttcgggctccggataatagacggtctggccaacttttatatggcttatacaggtcatattatgggggccagaatcgagacggatatgagaaccgacgcattctgccatttgcagaagctgtcggacagtttttacagcaatacaaaggtggggcagattatggcccgcattacaagcgatctgtttgacgtgacggaatttgcccatcactgcccggaagaattttttatagcattcctgaaaatcgtcatctcattttttatcctggccaggattaatctgcttctcacggtggttatatttatttttatccctgttatggctgtctcctgcacttattttaacctgaaggtgcgttctgcctttaagatgcagcgcaatcatgtgggagagctgaatgcaagaatcgaggacagtctgctgggcaaccgggtagtcagggcttttggcaatgagaaactggagattgagaagtttcagcaggataatctcaaatttttagatatcaaaaaacacacgtatttttatatggcggcattccaggatacggtgagaatgtttgacggaattatgtacgtggtggtaatcattgcaggagggacatttttagtaaaaggaatcataaatcccggtgatttggttgcttatacgatgtatgtgacgacacttttatcgacgatccggagaattatcgaatttgccgagcagttccagagaggtatgacgggaatcgagaggttctgtgaaattatggacgccgatatcgatatttttgacgatgccgatgcggaggagttaaaggattccagaggcgaaatcacgtttgagaatgtaacatttgaatatccggatgaccataatcaggtcctttccgatatcaacctgacgatccgtccgggcgagagaattgccctggtagggccttcgggcggaggaaagacgacgctctgcaacctgattccaagattttatgatccgacggaggggagaatcttagttgacgggaaggacttgaggaagcttacgctggagagcctcaggagccaggtgggaatggtacagcaggacgtgtatttgttttccggcactatttatgataatattgtatacggaaagccgggcgcctgcagagaggaagttatggaagcggcgaagatggccggggccgatgaatttattaaagagatggcaatgggatatgatacctatgtcggtgagcgggggtaaagctctccggagggcagaagcagcgcatcagcattgccagggtatttctgaaaaatccgccgattctgattctcgatgaggcgacttcggctcttgacaatgaaagcgagaagatggtctccaggtctcttgacaagctggcggtgggcagaacgactctcacaatcgcccacaggctgagtacgatccggggagccgaccggattttagtgctgtccggtaatcggatcgaggaagaaggcagccatggcgagctgatggccaaagagggaatttactatcatttatatatgtctgccaatggattttcagaggaagcggcagagtgattggaggaaatttgaatgaaaattgcagttgtgacagacagcaacagcggtattacacaagcgcaggggaaggaacttggaattacggttcttccgatgccatttatgattgacggaaatgaattttttgaagatatcagcctgacacagcaggaattttatgggaagatggaagaggacatggatatttccacatcacagccgtcacctgagtcgattgtggagctgtgggaggcgctgcttgaagaatatgacgggattgtccatataccgatgtccagcggcctgtccggttcctgtcagacggcgctgatgctggcagaggagtttgacggccgtgtccaggtggtaaacaaccaccggatttcagtaacccagaggcagtcggccctggatgcccttgagatggcggggaaaggaatggatgccgttcaaattaaggaagtgctggagagaaccggttctgagtccacgatttacatcacggtggacactttaaaatacctgaaaaaaggtggaagaatcacgccagcggccgcggcgctgggaacgcttctgcgtctgaaaccggtcctgaccatacagggagagaagctggatgctttcgccaaggcaaggacgatgaagcaggcaaaatccatgatgatatccgcaatccagcatgatttggagacgaggtgggatgataaagaagggaaaaagacccatctggagattgcccacacgaactgtgaggaagcggctctgcagcttaaggaggagcttctggagcttttccctgatacggatatccatattgaccctctgtctttgagtgttgcctgccatatcgggcccggcgcactggcaatagcggcggtgaaaaaattagaaatttaatttggaaagcatgaaaaaattgattaaaaaaattaggtttagacgttgtgtaagtatgaaagttcctctgctgttctgtttcctgctggtaacgctggtgcctcttcttgtgcaggccaggtttctggcaggttttttccggcagagccagattgaggacagcatgatagaggcgcagagcaaatgcctgatgcttaccaacaagatgataaccctggattacatcaataacatgtcgaataacccggggctggacgcggagatgaacgtgacggccgacctgtttaacggccgcattgtcgtgattgacagcagcttcaaaatcattaaggacacgttcgagctgaccaagggaaaaacgagtgtggttgaggaagtgctccgctcctttgaaggggagacgatcaaccgccggaataaagaaaaagattacttttatctgacgcttcccgtatattccaaggcggattcgcagaaggtggagggggttctgctgatgacggcttccaccgagagcatggcccttctggagagtcaggtgatgcataaagccggctttcttcagttcgtgctttttctgttcgtggctgtgatagatttattggctgcgtcatttcttatgaagccgtttaagaagcttcaggagcgtctgaatatggtgtctgaggggaatttagatcaggatatccaggtagacgactacaaagagacaagggggatatccaatgccgtcagccagactctccgcaagttaaaggctgtggatcagtcgagacaggaatttgtatcaaatgtatcgcacgaattgaaaacaccgatcacatcgatccgagtcctcgcggattccctgatggggatggaggatgctccggtggagctttacagggaatttatggtggatatttcagacgagatagacagggaaggaaagattattgatgatcttttatccctggtgaagatggataagtcatcaccggatttgaatatcacatcggtttcaattaatgcattaatggagcagattctgaagcggctccggccgattgccaagaagcgcaatatagagctggtatttgagagccagagagaagtcacggcggatgtggacgaggtaaagctctccctggctttgagcaacctggtggagaatgcggttaaatacaaccatgaagacggatgggttcatgtggttttggacgcggatcacaaattcttctatgtaaaggtaatcgataacggagtcgggattgctcccgaattccaggagcatgtgtttgagcgtttctacagggtggataaagcgcgttcaagggagaccggcggaacagggcttggactggcgattacgagaaacatcgtgatattacaccagggagccattaagctccagagtaaggaaggcgagggaactactttcacggtacgtatcccgctaaactatattccctgatatctgatgtgaaaggacggagtatatttgaaacgattattatatctgacggcagtttttttgatgtgtgcaggcatttgcggatgcggacagaaagagaagaaccagacgccggaggatggcacctaccggatttattatctcaattcaacaagaacaaagcttgccagcgtggagtataaaacagagacaaccgatcaggaaacattaatcggggagctggcgggccagattctggcggctcccgacaatcccgattaccaggcggctctgggagagaaggtcatacttctggatatcaggaaagaggagaacgttctttacctgaattttaataaagactatacggcgatgaagccgaccagggagattctgtgccgtgcggctctggctaagacgttcacccaggtggcaggcattgattatatcagtattaactgtgacggccagccccttctggatcagcagggaaatccggtgggcgctttttcagcctctgattttgtcgaaagtatttcggatgtcaattcatttgagcgggtggagctgaagctttattttgccaatgaaaaaaaggatcttctggttcccgagaccagggaggtaatccacaatgtcaatacctctcttgagaggctggtggtggaacagctgattgcaggctcccagacaggcgcttcgccggtgcttcctaaggatacgagaatattgaatgtgtcattgacggacaacatctgttacgtgaacctggacagcacgtttttaaacggcgaagtggaggcagcagactatatcccggtctatgcgctcgtcaactcgctgacggagcttcagacagtgaataaggtgcagattacggtgaatggttcggctaacgtggcgtaccgcaatgtgatttcccttgccgcgccgctggaacgggaagagaaatatgtggaaagcaaataaaaccccggaggaggaataacaattaaaagaccgcttttatggataacaggagcttatgtacttggagaggtcactgcttactggtccggtaaaatggcggaatatggaggaagggctgtggcgtccggcagtctctttccgatggcgttaatactggcagcaggcattcttttccagcttcatgagaaaatcaggaaaagaggtctgcttttatttatcctgcttgtctgctgcctgggcggctggttcaggatgacggaggagatgaaagaaggaccgctggaggccatgctggcgtccggagctatagagacggagaaccgaagccgggcggaggccgaagggcggatttcccaggctctgctgaaggacggaaattacaccattattctggaaccggcgacggttcgtgcaggcggaaagcaatatgaagaaaaaaggctgatgatttcagcaaaagaaagcaggaacggtgcggtgccggaggaggggatgtatctgtacgcaaaggggaaggcggaactctttcaggaggcaagaaatccgggggaatttgattaccgcctgtattaccgctcacaaaagctgagatgccgtctcagagctgataaaatggaaattatctcaggagagcgtcctgcttttcaatcccagctcattatgttccgcagatttgtcaaggaggcccttgcatttctttatcaggaggaggacagggggatttttcaggcagtgcttctcggggataagagcagcatggacagcgatatacgggagttgtaccaggatggaggaatcgcccatgttctggctgtaagcggcctccatgtctcactgataggaatgagtctgtatgggtttctgcggaaaagaggcgtcggatatggctgggcggggacggccgcggcaatcctgctgttcttctacggagcgctggccggctttggggcatctgtattccgggccgtgtttatggtgttctgttcgtttcttgcgtcttatctggggagaacctatgatctgctgtcggccatggctttgtccctgattttactcgcatccgattcgccttatcttttgtttacaagcgggctgcagctgtcctacggggcagtgggggcggtgggactcgccggcagcatgaaaatccacggcagccctctgttcacggccatgtcggccagtatagcaattcagattgtgactctgcctgttatcctgtaccatttctttgagtttcccctttacggcctgcttctgaatcttgtggtcattcccctcatggcttatgctgccggttccggaattatatcggtcggcctgtatggtatctggaaagcggccgaagtgccaggcgttctgttatttgcagagggaagcaaagtcgtaggaatgggcagcaggcttgggacggttatggacaagactgcgggaatactggaagtgatttgccatggggcggcgggaccggggcactacatactgaccttttaccgggagctttgccgtttttcactgaaacttccattctccacggtagcggcgggacgaccctctcttgcctgcatcgcattttattacggcgttctcgcagttttatactttcatttaaccagcaaaaacagcggcgctctgagcagaaaagaaggaaatgaatttaacgggaagcaggcctgtctctttgcctgtgcgctgcttttgctgatggtaaaaccgcgcgtcagcggaatggaggtctggtttcttgatgtcggccagggggacggaattttctttcgtacagggacggcagcagtgctgacagactgcggcagcagccagtataaaagtgtggggaaaaacagactggtcccgtttttaaagagtaaaggaatcagacggctggattatatttttatcagtcatgcggacagcgaccatataaacggaattgtctggatgctggaaaatgaaacggatttagaggttggaacgattattatgcccggaccgggacgggggaagaggaataccgggagatagaagagcttggcagaaggcgcaaaaccagagtttgttatatgaatgccggggaaaagctggaacggggggaacttaaaattacggctgtttatccggatgcgtcagcatcgccaaaggatcggaacggccattccctggtactttcggtgcgataccgtgattttacaatgctcttaacaggcgatgtgggacagacgggagaagaaatcatgcttgatgaaaaatacagccccggtagagagctgccgggcggaaacctgtccgttttaaaagcggctcatcatggttccgccacatcgacaggagaagaattcctgaaacagttaaatccggcagtgacagtactttcctatggtaaaggaaattcttacggacacccggccaaggaggtgttgaaacgtcttacggatgccggaactatgatatggagtacggagaattccggcgccatccatctcacaacggacggaaggaaaatgaaggcagaaggttttctgctggacaggaacaagggttccgggctataatactcaacaggaacgttatagttcagcgttcaatgttgtttagttaagcaggtgaggacgccgccggtacggccggcggacggggtggcggggggtgtatatgagtctttcgtcccgggggtggattgtcgtggtctgggactgcgggcgaagataaagtctgcggagcacgcttccgctctgtgaaatgcatcgcgctgctaagctcggcaggacctcgctaatcagcgatggatttaggcggcatccgcagactttatcttcccctccgccccaaggctatgttttcgccgggacgaaagactccgccaagtgtatcggccccgtccactggcctgcggccgctgaatgtctcacgcgttaagtgcgggggaggaccttgtcgcggccactaagagcttccgtgggcgggaaatacgatatgcattcaatgcgcctttatgaaagaattgtgctggatttgatatctgcctgcggaaatacgtagtgaccgcgacagggccctccccatttaaggttggagacaatcagcgcccggaacggaccgggtccggtgccccaaaaaccttcgccggagtcttccgtccccgtcgaaaacctgaccgggggaaggaggcggaatcaattgcggagggacatgggagtccgccggtgcttagcgaggttcctcacgagcttagcattccgatgcgcactccaaagagtgcaaacggtccccgcagcaattcattccggccggattccccctcacgacaacctccaaccggggacggaagactcagacagacttccacaccacaccggacatggtccattccggacgcgtcctccgggcctcagttaaatctccgatttattgcactgttaactaaatgacattggttcagcctttggccaaacggcaatatatgatgtacagaaacggcaaagaacgccgttaattgtacaggaacattctcctggcggtactcaggacagatgaaggagcagagtgcagatgcagacaattaatgaagacattaaaagcggacaatataaaaaagtttacctgttatatggggaagaatccttcctcaagcagagctataaaaagaaattaaaagaagcggtcgccggcgacgacacgatgaattataattatttcgagggaaaaggactggatgtgaatgagctgatcagtctttccgacaccatgccattttttagtgataaaaggctgattataatcgaggacagcggatttttcaaaacttcctccgaggctctcgccgattacctgccgatgataccggatactacctgtattgtcttcgtggaagatgcggtggataagagaaacaggctgtttaaaaaggttaaagagctggggcatgcggctgagatgaaacgccaggacagcgcccagcttgcgaggtgggcaggcacgatcctggcgcagaacggcagaaagataaccggctctacgatgaacctttttctggagcgtaccggggacgatatggagaacatcaggatggagctggaaaagctgatttcctatacaatgggaagcgacgtagttacaactgaggatgtggaggcagtcacaacggtacaggtaaccaataagatatttgacatggtcaatgccattgtgacaagaaagacgagactggccatggacttatatgaggatcttctgacgctcaaagaaccgccgatgcggatactcttcctgatagccaggcagtttaaccagcttctgctggtcaaagaaatgacggcaaagggaacagaccggggaacgatcgcatcaaagctgaaaattccgccctttgtggccggaaaagtatcggcccaggccggcgcgttcaccagagaacagattttgtcctacgtaaaaggctgtattgaggctgaggaagcagtgaagacgggaaagatgaatgacaggatggcggtggaattattgattacgagaaaatattgatttagttaaacaggtgaggacgccgccggtacggccagcggacgggggtgtatatgagtctttcgtcccgggggaagattgtcgtggtatggggctgcgggcgaagataaagtctgcggagcacgctcccgctctgtgaaatgcatcgcgctgctaggctcgaaaagacctcgccaatcagcgcccgaaacggaccatgaccggtgtgcgaaaacctacgcctgagtcttccgtccccggcgaaaatctgacccagggaaggaggcggaatcaattctgcaggggatatggaagcccatccgtgcttaatgaggtttctcacgaatttagcacggctatgcgcttcgaaaagtgcaaacggtccccgtaagaattcattccggccggattcccacctcacgacaaccttcaaccagggacggaagactccgccagccccctcaccataccggacatggtccgttccggacgcgtcctccgggcctcagttaaatctccatacagaaaaaaggttcccgccacaccaagcggaaaccttttttctattataatgggttaattgattgtataaattgaaagttccaaaaattaagccattgcgttaacggctttagataaacgggatactttgcgggaagctgtgtttttgtggtaaactcccttggaagtagccttgtcaatctcgctgatagcaactaataatgcagcctgtgcagcagccttgtcaccggcagtaatagcagcttcaactttcttggtaactgttttaaccttggatctgattgctttgtttcttgcagctcttgtttcagctactaaaattctcttctttgcagatttaatgttagccaatctgtacacctccatctgatatatcatatattatcaattctttggtttgcattaaagcctggacacggacagttcaatgtaaacatactattgtattttatcgaataaagtcagggatgtcaatatgtattttccggaattatacagtttttccggtatattttagaacaaaaacagaaaaactaggaagagatggcatgaaaggagattttcgatgtttaaccggaagaataacagtaataccgatcaaaataaaataggagagcttccgtcatttgaagccaggaccgacctggcggtggaagaacaggaaagctttgccggggacggcgggagataaagggagtggcgcttcgggagtggcaccacagaaacagtcatatcagattgacggaagtttcgattatggatgagcagggagcgcgggccatgggaaaaccggtgggaacatatctgacccttgacgtgccggatatggcggaaaaggatgacggataccatgaagaggtagccgaggagcttggaaaacaattgaatcttctgattaaaaaaatgtgtccgaataagaaagaaaaagcctcagttcttgtcgtgggactcggtaatatccaggtgacgccggattccctcggtccccgggtcgtggataacctgcagatgaccaggcattttctcggtgagtatggcgaggatttctgtgaaagaaatgatttgcctgtattgagcggaattattcccggagttatggcacagacgggaatggagacggccgaaattgtaaaaggagtagtagacgagacgaagccggacatggtattggctattgatgccctggcggcaaggaatgtgaggcgtctcgcatccacaatccagctcacggatacggggattcatccgggctcaggcgtcggaaaccacaggcacagcatgacgaaagacagccttggcgtgcccgttgcagccctgggaataccgactgtagtgggggcagcagcgatcgttcatggaactgttgaggcattgatccatacattggctatgaacagcggtacggaaggctatgcaaaatatatggaagatttggatccggaaagccagtatgaactgatacgtgagctgatggagccggaattcggaccgatgtttgtgactccccaggatattgacgagagggtgaaacagcttagttttaccgtatcggagggaatacaccgggcgttgtacggaaagaagagttaaaagggctgttccgtacagattaccgttcacaccatgcaaaaagcggcatgccgtaaacaataacatgcttcgcgatgcaccccgtacaggtccgagggaggaagaaattggaaagaatctggtaaaaagaaccggcttctgcatagaatggtagaaggagagaatttttaaggcgggacagacatgaggccgggaaaaataagaattatcagagagtatattgcagggaacagaaaaatatccatattccggccggcagcagcaatcctgtgcctgttcttgtttgctttttttgcaggcagggcggttgggagactgccgtcagccgcgtggaatatcattacgggctcaatgggggctttgagagcaggacggccctttttatatggaagaactggtatccgtcggccggattttctgaagccggatatggaaatatgaaagatgaggcagaggatatggccggccggctggccggttttattctgaaacaggtaccttactacaggatggcggaaggcggacaggaaaagctccgcagggagctggagccggatccctcttatgcagattatctggagagcagccggattttaaaagaatatgagtgccttgtgagagatttggagggcagcagcgtactgacttcgggaggggttactacatacagggatacggaagagctggcggataattccggagcgtacggagagaatgaacttacagatggcgcggtacaggggcagaaccagggaaaaggacaggaagacttaatacagaccgccggaggacaaaatcaggccggcagccggatatcaggcggtcgtccggccggtgacgcgctgttaaataaagggactgtcagcgcttcggggatcaaatatgtttcggagcagcttgccgactatgatttcctgatgaagcatttttatacggttcatcccacaacgacggccggcagggacatgatgagcgccggtacttttttatctgagaattttgctctcacacaggggaacgataaaccccagattttgatttaccatacacactcccaggaggaatttaccgattttcatgagggaaataaagaagcaacaattgtcggggtaggaaattacctcacggagcttttgcagcagaaaggctataatgtgatacatgacacgtcggtgtatgacctcagggatggaaagctggatcggagcaaggcttatacatatgcattagaaggagtcacggcaattttacagaaatatccgtcaattcaggtggttctcgatattcacagggacggcgtgaaggagacgacgcatcttgtaaaagagataaatggaaaaccgactgctaccatcatgttttttaacggaaccagccagactccggaaggcccgattgaatatttgaaaaatccttacagaacggataatatggctttcagcttccagatgaagctctgtgccgatgcctgttaccccggatttacgagaaaaatttatctgaaaggtctccgatataaccagcatgtcaggccctgctcggcgttaatcgaggttggcgctcagaacaatacatatgaagaggccaggaatgcgatggaacctctggcggagctgctggatatggtggtaaggccggaaggctagcagcttcacacatctttaataaaatcatatgtggagttgcggtagtagtatttaacaaataaaaatccaagcagggttaccagcgtcgttaaaataccgccttctattccgaagataccgcctgtgataaagttatcggctgtaaagtgtgttgtaatcattccggtaacgttaattccgctgacaggcataccaaagacaaggccctggaaagagttccaggtgaagtgatatccgatgcacatccatatattacctgagcgtatatacatataagaaaacagcagccctgccagaatgatgttacaaacggaaaaaaaagtcaccccgttatttcccagatgtataagtccaaaaataaaagaggggaccagcacaataaaaggaaggtttcccaccctgcgcagggtggacatcagaaatcccctgtttatgatttcttctcccagggctacgaatataaggacaatgagccaccataactgaaggattgaaaaagatggtacccatgattcgacaactgcctggccggagacgactgtaatgaaaaatacggtgaaacagcagagagcgccgagaaacatgccggcatacaactccttatacctcattttaacgggcttcagccccatggaggaaagagagcgtttcatcaccaaacaccatgcggcgattggcgtcagtatcataactaagtcatataatatctgcatgtagaatggtaagaatatattatacacccaatcaaagacggcatccggctgctctcctgcagagggataatgaccgctggcgctcagtaagttttgtaataacccaatagacagaaacgacagtaaatcggtgatggcatacaatgccgcccatacaagcaggataatccaaccggaacgaatctgaccgcgtttgtttttaattactggattgtttagaagaaagttcataattttccacctttttgatttattataatgagtcattctaatgctatcataacgattattgagtaaaagtacaataattttgttgaatttatttgatgatacggaaactgtgaagattcgtgaaacggtggtccatatggtgaaattatcattgtgaatcaaaaaagagtcgcttaactggttattaagcgactctttttttgcaatttacttcaatcctgctcgattcttgtaaattataacaccctttatgaggatggtcaactgatagaaaatgaatgttaaggaataaatgtaaatattttcttatttttcattcatttgtacatttctgtcaaaaacgagtgtgatccgactcaagtatacggcggtcaattacagatacagaaatacaaatagcattaaacaatcgttattgcaaaaagagtcgcttaataaccagttaagcgatcctttttggaaaaggagggcgtatatgagctggtatgttttacaatgccgaacaggtcaggaagacaaaattatccgttcctgcaggcagcatatctcatcgaatgcccttgaggaagtattttcattccgctgtgaaagattatggcgcacagacggcgtctggaagcttgttgagaaagagatgtttcccggatacgtatttctggagagcagccgtcctgacaaattgtcggaggaactggaagcgtacaggaagatcttaaaagtgatggaagaaccgggatatttaatttccgtatacgaagaggaagaaacgtatcttagaaagctctgcggtgaacatcactatctcaggatgtcttacggttataaggataaagaaagaggtatgtcttttataacagaagggcctctgaaagggctggagaaccggattgtcaagtacgactggcaccgccgttttgcccagttggagataccggtgtccaggaggaatgtgagcgtctgggccggaatcggtatcgacgaaaagcttctaaacagagaagtggatggagaaaagcaggaaaaaggtctgtttctcgtttcataaaaatatgcgggagggctgtacagctattgaggcatgcagcctgattgtgttgttataagaatcaataaaggactctggagttttttaactgcagggatggcgaagctatgtcttttatagaatagaaattttattgaaaggatggcgggtatgtggtatgtgatacagacgattaccggaaaagaggaagagctgatgctctttatgcggacaatactttgccgggagcattttgataacagctttgtgatatatgcagaatggatgaaaaggctgggaggcgagtggcagattcaggtgaggcccttgtttcccggctatgtttttatagaaacaaaagagccggacagactctatatggaactgaaagccgttccgaaattttcgagacttctgggaactggaaaggatgaatttgttccggtgagtgaggaagaggaacaatttctccggatgattattgataatggcgagacggcagttagcactgtcaataatgaaagggcagttgtaaaactgacggttgtggaaacggaagcagatggaggaataatttccatggatggagcgctttcctgctttaatcgtaatgatgtcacggtgaatctccataaacggtatgcggtggtgaagacacgattgctggggaggagagatccttggtgtttggaataaggctgaagaaggatatgtaaaagcattgggaggtatttgataaaaatatgtaccgaaaatatataaaaagatgtatagatatttgtatgtcggggatgggggtgataattttatctcccttttttttattgattgtaattgcaataaaaaaagattcacccgggccaattttgtttaagcagaaaagagtgggaattcataaaacgcattttaacattttgaagttccgcaccatgcgaacggatacaccgaaagacatgcctacgcatatgctggcggatccggaacagtacataacgaaggtgggaaaatttctgcggaaaacatcgctggacgaattgccacagatcattaacatactgaaaggcgacatgagcataatcggtccgaggccggctctttggaatcagtacgatttaatatcggaacgggataagtatcatgctaatgatgtgatgccgggactgagcggctgggcccagattaacggacgtgatgaactggagattccggtgaaggccagattggatggagaatatgtaaaacggttgagcttccgctttgactgcatttgctttttggggacgattttgtcggtgatgaggcatgaaggagtggtggaaggcggaaccggagtgatgaaacacgtggacccaacggacaaactgcaaaattccaggaaaaacaggatagacaatatacggagaaagagaacttggtacggtaaatgaaaagaatattgataacaggggcagatagttatatcggaacatcatttgaaaaatgggtgactgagccacggtttgaagggcagtatctggtagatacggttgatatgcgcggggaggcgtggaggcagacggatttttcgggttatgatacggtctttcatgtagcgggtattgcacatgcagatattggcaaggtgacggaagaacaaaaggctctatattatagagtgaattgtgacttggctgtggagacggcaaagaaggcaaaaaagtgcggcgtaaaacaatttatctatatgagttcaattattgtatatggagaaaatataacgctgcgtaaaaagcgcattattaccaggaaaactttgcctaagccgtccagcttctatggtgatagtaagtggaaggctgaaaaacgtctggataaaattcagaatgatatctttaatgtggcgatattacggccgccgatgatttatgggagtggaagtaaaggaaattatccgttgttatcgaagctggcacagaaagttccgatttttccggactttcctaataagaggagcatgctctatattggaaatttgtgcgaatttgtaagacgcctgattgagaatggagagggaggtgtgttttttccgcagaactccgaatacgtgaggacggctgaactggttaaaaggatatcagaatgccatggatgtaaattacacataatcaagggttttgattggtttatatatttattaagcaagtttcctggaaaagtcggaggaatgctcaataaggggtttggtactctcgtttacgaaaaaaatatacaagatgattattcctataatttatgggattttaaccattcgatagcggaaactgaaaaggaaacataatatgcatttactggttatttcacaatatttttatcccgaggaattcaggataaatgacatgtgcagagaatgggtaaaacgtggctataaggtaacagtggtgactggaattccaaactatccgaaaggaacattttataacggatatggattattaaaaaaacggtcagaaacatatgaaggaatagagattatcagacttccaattatacctcggggaaaacgttcgatacagttaatattaaattatttctcattcgtactctcaggtatggtatggcaatggtttaccaggataaaagcagactatgtttttatttttgaggtttcacctatgacgcaggcattaccgggaatctggtatgctaaaaaaaagaaaatcccctgttatttatatgttcaggatttgtggccggaaaatgtagagattgtaacgggaatacattcaccgttggttataggtccgataggtaaaatggttgattatatttataaacgatgcagccggatatttgtaacatcacagagctttaaaaatgccattgaattaagaggtatagagaaaaagaaagttatttactggcctcaatatgcagaagacttttatgtgccttatgaaaaagcaaagtatgacgatactttcaggcttatatttacaggaaatatcggatatgctcagggacttgatatactgccccaaacagctctcttattaaaaaaagaaaatataaaatttatattagtcggtgacgggcgatacaaaaatgagttaatgaaagaaataaaacaactggatgtagaagatatgtttcaaatgattggccgtcagcctgccaccaaaattccgcagctgctctcaaaagcagacgcggcttttttttcatttatggacaatcccctgtttgaaatgacaataccggcaaagctgcagtcttacatggcatgcggaatgccgattgttgcggctgtcagtggggaaagcagggaaattattgaggtggcggagtgcggaatatgcagccctattggggatgcggggaaactggcggaagctataagaaagatgaaggagtctgatttagtaaagctgggaaagaattcccagctatatgttcaaaaatatttttcaaaagaaaaattattaaataaaatagattgttattttggagggaagtatgtttaaagacaagacattacttatcacaggtggtacaggatcatttggcaatgcagtgttaaaccggtttctaaatacagatatcaaggaaatcagagtgttttcaagagacgaattgaaacaggataatatgcgtcatttttatcagcagagttacccggaggtcagtgataaaattaaattttatataggtgacgtccgcgacattcacagtatcaaaaatgcaatgcatggagtggattacatttttcatgcggctgcgttaaagcaggttccttcctgcgaattttttccaatagaagcagtgagaacgaatgtattaggtacggaaaatgtactgacagcagcaattgaagagggagtgaagaaagtaatctgtctctccacagataaggccgcttatccggtcaatgccatgggaaccagtaaggcgatgatggagaaagtcattgtggcaaaatccagaacaatagcacctgagaagacgacgatctgctgtacgcgctatggcaatgtgctgtgctccagaggttccgttgttccactgttcattaaccagatcaaagaacaaaaaccgctcacggtgacagagccgcaaatgacacgctttattatgagtcttgaggaggcagtggatttggtgatatttgccttcgaacacgcggagtccggagacattatggtacaaaaagctcctgcctgtaccattgaagtattgacgcaggctgtgaaagagttatttcatgcagataatgaggtgaaggtaattgggatccgtcatggtgaaaagatgtatgaaacacttcttaccaatgaagaatgtgcccatgctattgatatgggctatttttatagggttccggcggataagagagatttaaactatgataagtattttacagacggtaatgaagagagaaacaaactgacagaatttaattcaaataatacggagcttctttcggtggaacaggtgaaagaaaaattaatgacactttcttacatcaaagaagagattgccgagtgggaggaaaataagtcatgaaagtacttgtgactggagccggtgggtttataggaaaaaatctgtgcgcacgcttggcttatgaaaataaaatcgaggtactgccttttgaaaaagatacggaagtgggaaagctagaagaatacagtaagacttgtgaatttgtgctacatcttgctggggtgaacaggcctaaggatccgaaagaattccaggaggggaatttcggctttacatccaagcttttaagttatttgaaacaaaataaaaatgattgcccgattatgctggcctcctccacccaggcagaacttgataatccctatggaaaaagcaaattggcgggagaagaattactccgccagtatggggaagaaacaggggcaaaaattttaatttatcggtttacaaatgtttttggcaaatggtgtcttccaaactataacagtgctgtagctacgttttgttacaatacggcaaatggtattcccttaacggtgaatgggagagaaacgaaagtaaaactgatttatattgatgatgtggtggacgagcttatatctgctctaaatggaaaagagaatagagataatgcagttttctgccaggtacagcctgattatacggttactcttggcgaaattgttgatttacttcaggaatttaagaactcaagagaaacgaaaattgttccggacatgacaaatgaaagctttagcaagaagctttatagtacatatctgagttatcttccagagcaggaatttaaatatcctctcaagatgaatgttgatgagagggggattttcacagagattttacggactgctgagagaggtcagttttctgtaaatatttcaaaatcaggaatcgagaagggaaaccattggcataacacgaaaaatgaaaaatttgttgtggtcagcgggaaggccctgattcagtttcgcaggccggaatcgaaaaaaattatcagttatcatgtttccggagaaaaattagaagtagtggatattccagttggatatacgcacaacattattaatgaaggagatacggatctggtgacatttatgtggtgtaatgaatgtttcgatcctgaaagaccggatactttctttttgaaagtaaatgatgaaattgatgactgatgcaagaaagcggctaataaaattgcaggagtatagaaaagcgaatgaataaactaaggttaatgacaattataggaacccggccggagataatccgtctgtcggaagtgataaaaaaatgtgatatctattttgagcagatactggtacatacggggcagaactgggattatacattaaaccaaatatttttcgaggatttggggcttcgacagccggatatttatttggattcggtaggagacgacttgggagaaacgattggaaatattattgcaaaaagttacaaggtgatgaaggaacaaaagccggatgcattattaatactgggtgatacaaattctgcgctgtcggctatttctgctaagaggctgaaaattccgatttttcatatggaggccgggaatcgctgtttcgatgaaaatctaccagaagagacaaatagaagaattgtggatcatatcgccgatgtgaatttgtgctacagtgagcatgcgagaaggtacttaaatgcagaaggaagaccgaaggaacgtacctatgtaaccggatctccgatggcagaagtgctaagccggaactggataagatccaggagagtcagattcttgcaacgctcggcttagaatcaggtaagtatattcttttatctgcccatcgggaagagaatattgacaatgagactaatttttttgatttaatgaacgcagtgaatgagatggcaaaacagtatcaagtgccggttatttacagtactcatcctagaagcaagaagtttattgaagcaagaggatttgaatttcatccactggtgagaagtatgaaaccatttggattttcagattataaccatttacagatgaatgcattctgcgtcgtgtcggatagcggaacacttccggaagagactgcttattttaataaaaagggattacatttcccggcggtctgcatcagaacatctacggagcggccggaggcaattgataagggcaacttcgtattaggcggaatatccggagaacaggtgttgcaggcagtggaattggctgtaaaaatgcaggaaaatagagattttgcagtacctgtgccggactatgtggatgagaatgttagcgttaaaatcgttaagatcattcagagttatacaggaattgtaaatcgaatggtgtggaggaaaaatacttctcaaaattgatttgtacagtaaatcaaaagagtggtaagaaaatgttgaggaaatataatgaatagtagctttaatataccagtggtgctttttatttttaaaagaaaagaggcatctaaacgaatagtggagcgaatagcacagattaagccatctcatctctatattttatcagatcatggacgcagtgaagaggaaagaagattagttatagaatgccgtgaagcggtagagtcgattatcacgtggccatgtatgataacgaagttttatgctgaagaaaatataggggtttatcaaaatattggtgtggggctatgagagtatttgaaaaagaggatcgtgcgatatttttagaagatgataatttaccggaagtgagcttttttcaatattgtaatgaaatgttggaaaaatattataacgacgaaagagttttatgggtatgtggtacaaattacctaggaaaatatacttctcgggatggtgtggattataaatttactcagcacatgcttccttgtggttgggcatcttgggggcataaatttacacgcttttatgatggttctttatcaattttggaagataaacattcgttgtggaagttgagaaaaaattttgaaagcgggaaattatttcgaatgtatcgagaacgctggctcagtgaacgcaaaagaatattgcagggatatgaacctatatcatgggattatcaaatgtgtttagcattgagagctaataatttactagggatcgtaccgatgtgtaatcagattaaaaacattggtgtggatgaattttccactcatggaggaactacaatggaaaatattatgacacagcgatattgcggaatggattcatacactttggaattccctttaaatgctccgaaaagtgtagaaaaagataagcactttgaaaagttactggaagaaattattgtaccacctatgaaattgagaattcgaattataattttgcgtgtgattaagaaaactctaggattacaagaggaagaaagtttaagaaagtttttcaacaggtcttaatatgaatacgaaaaaaaaatggataaagatagcaacagttgcggtcagttcaggaatatcacaagctcttacgctgatttttggcatacttttagtacgtgtccttactatgaaagaatatgcagtataccgtcagggaatgctggttgtgaatatgttaagcccatttctatgtgtattatcacctatttcgcttagttattttttggctaaagaggaaagtgaagaagtgaagaagtattatgttaagcaaacagttttttgtttaattttaaccagttttatgatttcattgattgtattctcctttaaaggtcagattgcatattcctacaataatcaaatgttatcctcgtatatgctgtacttcgcaattatattatttacagagggaagtacacaatactttgcctattatatggtttgtataaataaagaaaaaattatggtaggtataactattactttttcatttttaaaaacctttgcattgctccttacaattttaatacagaaggattatttgttgctttttatgcgtttttatgtgggaatcgaagtttttagatttatgttaattataagttatacttatcttatgaataaaacatcgggattttgtttagttaaagaaaggttaaaacttcagtttttattttcaatgcctatttatattatggggataattaacgcagtcaatctcaatctggacaaaaatattgtggcaatgatgttttcatcggaacaatatgcgatttatgaaaatggagcatatcaaataccttttattgggatattatcatccagcattatttctgttatgcttccagatattgcaaaaaaatttaaaaggtgtaacagacaggtgttaaataatatagtttctgaatatcaagatgtaatacgagttagctatgggattttatttgctgtatatgtttccatatatattttttcggaaggcattgttactatattgttttctgaaaaatatttagcctcacttcctatttttaaaaattacttacttatgatactattacaatcatttaatttaggagttttactcacatcagcagaccgacaaaaagatattgtaaagacaggtttgattatgtttgcatgtaatttaggattgttattagctttggcaaaaacaagaaaccttgtattattaagttttgcaccgattttagcgacaataataatgaacattttgctgttgctttttatatgtaaggtatatgaacaatccagcttttttaatattctacctataaaatttatagttaagcttgtaattccgggaattggaataggactgttctttaggacactactgacaatatgtccattgggtttgatattaaatacaatcatttttgggcctgtttgctttcttatggtggcaggtgcttcatttattttaattcgacaagaaaaaaggacaaataaaaaatgagaatgatgtgtttcctgaataccgcaaagaaatatttactgattataatagtagttattaatacattaattataactttttataattattttcctctaaaaattgcacactctatattaaagataccgcatattattgctattctacttgcatgtggaattgtatataaattacagaacaaaaagtataaaataaatgattttgcaaaaaaaatactttttttattaattttgttagcaacaatttatattagcgttagctttgttcgatggatgttatatggattcgatttcgcacgatttagcttatatttagcaatgtcagttttatttgggagcatcatgtttttttcagttgactctgaaatattatcctataaatatcataagcgagatataatttttataattacttttttaaatatactacagctcatgattagcagcgtaacatttggcggaatcagagcatcttatctacttgaaaacattatggtttataattgtgtagttatagcatttttaccacaactttttattatattatataaatctgaaagtcaaaaagataatatattttctataattaatattataattaccgttatatttgtaacactttcaggctcacgaagtgctgtttttgtcatctgggtaatattttttatgagtgtaatagcattaattacattaaggcgtagaacagcgtggtttcattgcatggctatgattttaataatcccagcgactatcgctgtgttgtaccatataaatatcctaggggctagatctgctttagatagaagctttttttttcatatttcagagacaaatgttgggcgtcaagaagttaatttaccaacacaacaaaattcggaattaacagaagtttcgcgtggaattatggaaagcgataatatgcgaaaggagttatggcagaatgcaattaaagaaataaaaaaagagccagtgataggaactggaataacttattttgacaatcactttggttctattgttttacagcaaagtgcgcataatgtaattcttgaaatttggctggtatttggtggattgggatttgcagtatatttgtttcttatgattatgattatagtttatcttctggttcattttcttaagttcaagcatagagcgatttttatgttacatttactttcaattgtcagtattcttattttagccttagttcaacctctaatggtcatgttttatccatctacaatttactggttactcgtgagttgggcatacaaatacacaatacagagaaaattgaagaaaaggggattgtatgaaaagtgtatatcctaaagttagtgttattattccattctataagggagtgaattggcttgacgaagcagtagatagtgtaatagcgcaggactatccagaagttgaaattataattataaatgatggttcaccagaagatttgacaagattcctaaaaaaatataaagatgcggtcattatgcttactcagaaaaacaaaggaccagcggctgcgcgaaatacggggataaatgctgcaactgggaagtatgtggcatttttagatgcagatgatatttggatgccagggaagcttaaatgtcaaattgaagcgatggaacaacaaaatgcggtttggggcaacattcgtttgagattttttgggaaggctcagatgaaaaacgatttattgatacatcacgatatcaaggagatgtaagaaaagaaacttttatatcttttaaagtacagacaggaacatttgtagttcgtactcaagagttaaatcaatatcatattcgttatccggagagtaagcgatatggagaggatgatagattttactatgatcttgcttgtcattggccactacactatacggaaggaacatatttaaagtttcgaattagaggtactaacgctgcgcagcaagcaaaggttcaactattgaacagggcttcggtttatcaagaattttttattgatggggaaatagatgtgcaacttccattatctgctgatattggatataaattggcttttggagcagcaaaagtagtacgaaaaataaagaataatagatatgctgaaggggtgtcaaaggcactatacttggtaccgtacatactttttaaaattgcagattattctttgaaaaaagagagggattgcgggaaatgaaactcttgtatatcggatcatattgtgataaggaaatttttaatgaattgaatgctcgaaagaatcctttcttcattgcgcaatattcatatgaatatgcaatgtgtcaggaatttttgaaagaacaagatatggaaatagattttgtgacattatatcaggtagagtattggcctaaggaaagactattttgttattttcctaaaaagaaggatgatctgtgtaaggtattaggctttattaatataccatttttacgagaaatttcttattccatttcaataattggaaaaattataaaatgggcgataaaaaatagaaatattaagtgtaaatgtgtatattccagtatgcattttacgcctgtatctatagcagttgttatggttactaaactttttagaatcaaaagatgtattacatttacagatttgtctttattcacatatagtgaagaaagaattaaaataatgcctttatataagcgtgctataattagaccatatatcgcagtgacaaatttcttacagcaaagttatgatggttatgtgctttttacagagaaaatgacaaacgttgttaactcacataaaaagccatattgtgttgtagaaggtatttacaataatcatgggatcaatttatcaaaaacaacagaaaaatgtgatgcaatagcatatgccggtacgctaagttctttagttggggtgcgcaatattatagatgtttataagtgcatgcatagttcatcaaaactttggcttatgggaggaggagatatggaaaaagaaattagatgtctcagtcaggaaaacccgaaagtggaatttttcgggtttctcacaagaaaagaagtttttgaaagattaaaaagcgcacgactcttagtgatattgcgaaatgccgatgatgaatatacatggtattctttcccatcaaagttattcgaatatatggcttcaggaacacctgtgtttacaacatatttacaggggatacctgaagaatattattcatatttgtatagcacaaaggaggtaaagattgaaagaatcgctcaggaaataatggaagttttaaataagtctgatcaggagttatatgaaatggggcagagggctaaaaagtttatattagaacagaaaaatgcagttattcagagtaagaaaataaaagtatttcttgatacattgtttttgtaagaaaagataatccctttataaagaagtattttaagaatggattaattataggagaatagtattatatgactaaagataaaataattcaaatattgattttaatgcgagtcaagcattggataaagaatgggttgatttttttaccattattatttagtggctttttctttgatagaggtagactatgcaatgcattttatgcatttctttctttttcctttctttgctcactcgtatatattataaatgatataaaagatgtagaaaaagacagattacatttcaagaaaaagaaacgaccactagcctcaggagcaataagcataaaaatgtcaaaaataattgttttaatgttacttttgctagttggtgttatgacttgtttcttagaaaatttaatgtcaataggtattttagtaatatatttagtaatcaatttagtatatagttttggtggaaagaacattccaattttggatgttcttattttagtttcaggatttattttaagaataggatatggggcattagaaaccgatattgaaatatcacattggttttatcttacaatcatgtcaatttcattttacttagcgttagggaaaagaaagaatgaattaaaaaacggtattagtacaagagcagtattgaaatactataatcagaaatacttggaaaacaatatgtatatgtttttggcattatcaatcacgttttattcgttatggtgtgtagaggtttcaaattctggaaaaatatttgcaccagtatttattatgacaattccttatgttatatgtacagttatgaaatatagtttattattggaaggggacatagatggtgatcctatagaaacactttttagtgataaatttttagttatagcagtatgtggatatgttatcatttcatttattggtatatatgtctgattttaaataggagatgaggctatgatgttttggattacaatgtatacggtagggatattatgtttaagtggaattccgatatatgcaattttatgttattttgagaaggggaaagggatacaaaaacttattttgacacctattttaggcttttgtattttaaccgctataggcagaattttagttggctttggtataccaatcaaatatttttcatatccactgataggtacactgggaggaatcggtgcaataattttgcttaaaaatagaagattatttgtatttgacaagggaatgatatgtggaggaattgttgttatctttgtggcaagtatagggtattggatgagtaatccggatgtgtcggcctttttggcatgggatgatttcttatatgcaagtcatggagagatgctgaactcattttctgttaaatcagcatttgatgccgccccatataaaccatatatgacagttatcacgaatgatgctaggaattggaattatttaagattgtctttggcaatcattcaaggaataattagttcaactttaaaaatagatgctgcgtataccaataggttacttggtataatggcggctctttttatgtattgtgcaacatggtatgcaggcaaaaaatttacattttctaataaaatgcttattgtattaagtgtatttgcttctgtagctccgggaacattggctttcggatatgaaggatttcaaggggctgttcttatggcaccttttttgtttctatggcactttgttgtttatgaaactattacccatccgacgaaatgtaattattttttatgtagtttagtatttgcggcagcttcaacaatctttacagaagtaacgattagtttaattataatagtattcatagaatgtttttttgaaattttgtttaatgtaagaagaatgacaccttttaaaacgggatttttaatattatgtggcggaatcttgttgaatagtcaatatttgattacggtttactatcatgaagctttcaccgcattaaattatttttcgagttctcattttgatgttttatatccgtatgcaggaactattgttggaattcaacgaaatttatttgggactattgtggaatctccattaggaattgtttcatttgttctgtttatagttgctttcgctggtgcaataatttacataatagaacaaaaggatattatatgtataactattatagcgactttatgtagtgctttttttttcatatctacaacagatttaagaacatttaatttttatagattgtttacaatgaatacagtttcaatagtggtatttttggggttatttattagaaaaataaaaatatttttttatacggaaagttttaaaggctatatttctaatataaaaacaaaaaaaataattataatttctataaatattttttttactatcttaacaataaatgcagctattgcatccatgtgttttggaattgcggtacaaacaaaacctatccaaaattctgatgaaaataatttctattatacaggaattgagagaagatttaaaacagaagtagaatataatgaatatttacagcaattaaaacgaatacgaacatgctccaaagaaaaactattattttcgtcaaatttttcgtcactaaatctatggactttgtcatactttggaaaagacaaggaatcatatttttttcaacccgatttagataaccgctataatggaaataatttactagcatcttaccaaaatattgaacgtctaacgaaggaacccgaaaatgtgtgtataattaatttaaaaagcgaggatgcggtgtttaactattctatactgcctgagtgtatggataataagatggcagtcagtattatgagtaaatctaaaaatgcgtcattcgcttcggtacggggaccttatgattatcaatatgatgatagttatttagttaagatattttcagtagatgaacaaaaggttaaaataaatctacgtatttattcggaagaagatatgtatccgatttttgtagagatcgataatgaacggtatagaatgaaaaaagtagcggagcattattatatattagatgtagattgggaaacatttttaaaaagtggaataaatcaatacgcaatgagttttgtgaatatgaaaaatggaaagaggtctcctgttgttgcatctgtaacggatataacaataattggagaatagagtaaattagaagtgaaatgtagcttaataggctggtggtatatttttctaagtatcctactggccatgatacaggaacgcaggtggcttttgagtatgccagacagtggctgcagaacggatatgcgatcagcccgtattctctaccactggaagaaaaagtgtttattccccggcacgaaccgttcgagggattgtttggtgtgtttgatgacagtctgccagagggatgggggcatctgctgacggatcgccttcttttgaaaaatggtaagaatccttatgagattgactgcctgaacaggctttctatcgtcggggattcaggtatgggagcattatcgtatcgtccggtccatgatttaggagaagtcggagaggttttggattatgatcggatggccagggagtgcaaaaaaagttctggaaacagatttttctgaaaatctggagagtggtttggatatgatggatgtcaggctgtttccttcggaacggtgcaccggttactttgggacaaaacggtttgaccgtgtgagagataaagatggaaatatgcaaagaattcatatgcttaccgttagcgggatgttagagacttcccatagaataccgaatcttgattatcatctgttaatgaaactgacactcagtcttacaaaagattacggccagatagaacaattgtttcggcaaatatgttttaatgtattgcccataaccgcgatgaccattccagaaatttttcatttttgtataatgaaaatgataagcagtggaaagtgtcaccggtatatgatttgacttacagtaattccctgggaggtgaacatgcaacctgtgtagatggaaccggtaaaaatctaggcatgaaagagattctctcagtagcaaataaaattggcttcgctcaagacaaatcaaagcatatagtggagacaatatatgagattgttgaacaggaaataggagatattctaaaaagcaattggagcatcgctgattaatgcaatatttacttaggtagtattcgtgaaagcttttttaagaatactacctgaactattacttgaatatcactttggcgtaggaacatctcccattcctctcttgtaatttcccactcactatgcaattttttcactcaggaagtttcctgcctgtccggtcatccgctgtatcttttgcgtcggattctcttataaccgcagtgaaacattcactttccggttttcccagcattcagccaggacattcaacaacaagcaattaaattaatcatatcaatccccgtatacctcgattgactgtgcaacacctatttgttatactttggaaaagagcacatggtaaatatgttaaagatagcataaggcatgtccgcaaagccgttttccagggaagaaaggcggagcgtcataactgtcattaacgcctgatatgcgggggagaaaatcaggaaaaccgtgcaaatacgatgccctagcgcattatgcgggatgattatgccgcctacaaagagcagatatggtcgttggtacacaagaataagtcggcgggaaaacctgcagtcacgaaaaggattcacgacaatcaaagattggccccggtgctcaccgtggtattatattggggagaggaagaatggtcaagaccgttaaaacttcacgatatgctggaatttccgtctgacatagaggaatagattaagccatttgtgtctgagagggtgcggacactttgttggacttaagcgaccaaccccagactccgtctatagtttagcggactcataccgccaagtgatatcttgatgcgtttttcatttgtatatactcatcccgttcctgaacgaagtcttcaactgttgtatctttcctgatatgacaataaaacatctcgtttttcagccggccgaaaaatccttcacaagctgagttgtctggagaacatccttttttagacgctgatctggtaagtctggcattttccatacgctcaatccatccaggccatcgatagtgacagcctcgatccgagtgaataataggatgctcatcatcctccagaagtgcgattgccttatctagcattcggtttacaagagctgcatcaggagagacacctacggtccaagaagctatagtaccgtcaaaacaatcaataataggtgaaagataaatttttcctgctggtatggaaaactccgtaatatcggtgagccacttgctattgggtttatgcgcgtggaagtcccgtttaagcaggttttctacagggctaattaacccttcttcttgcataatgcgtcttactactttttctgaaatgatagttccttcagaaaggaggaccgcatgcacacgacgatatccgtagcgttgtgaagcatcttcaaatgtactttggatatctatccgtaactgggcaaacttatcaggcttcctcaggactgcttcctgatagcagtagctgctcttggccatatttaaaataacgagcagatcctttaataaatagcgatttctcagggcatcaatcaccatggccttgtctcgattgttgagtttttcaatacggatgcccttaactttttttaggagttctgcagctttctttaacacatcattctccagctggaacctgtaggattctttctttaaagcttctactttggcctccagatcgagtttttcttttttgagttggataacatccttttccttgtcaggggattctggcattacgttctttctcccttcgcccagtaactttctcatgagtacatcttacattaggctttgaacgtttgacaacgtctttctgcttcgtctggattgaattcttcaacccagactttaaggagtgggcgactaggatagcttaacgcttttactgtctggatagcgttcttcccattctccatgtaatgtcggatagcgcattccttttctttgtcggaatacttactgtaacgatatttccgagtatggagagattgactccgttgatactcatcaacccaatgggccagcgatgtgacatctggatatcccaaccgtcgtacggttaatgcagcatgtttaccaagttcaaaatagagtttcacggcattcaaacgtttttcaagagaatacatggacgacctcctttgatttatgaagtccaggatttcgtccgcatcccccctccgcatccccagacaaatggggagtggaatttactttttcatttcaggcatgaaaaattctccccatccctcttgccagttcccccaaaaaatgctatattctactagactgacaaactatgcccaaatctcgccctatatcagactgcagcggatttcagtaatcaaaacagggcatattttttaatagaagcagtgtagttcggcctacacccatcacaataatcacaacccaaagaaaagaggaacccacccatggcaatagttgaccaaagcaaaatcagaaatttctgcatcatcgcccacattgatcacggcaagtcaacccttgcagaccgaattatagagaagactggcttacttaccagcagggagatgcagtcccaggtacttgataacatggacttagagcgtgagcgtggaatcacgatcaaggcccaggcagtccgtaccgtatatacatcgaaagacggagaagagtatatcttcaacctcatcgataccccaggccatgtcgatttcaactacgaggtatcgaggagcctcgcagcctgcgacggagcgattcttgttgtagacgccgcacagggaattgaggcccagacgctggccaatgtataccttgccctcgaccacaacctggatgtatttccggtaatcaataaaattgaccttccaagtgcggaaccggatcgtgttgccgcagagatagaggacgtaatcggaatcgaggcccatgatgccccgagaatttcagctaaaattggtttaaacattgacgaggtcctggaacaaattgtcacaaagattccggctccccagggagacgcggcggcgccgcttcaggcattgattttcgactccctctatgactcctacaaaggcgtcatcgtattctgccggattaagaatggaagtgtccgcaaaggcacccagattaagatgatggcgaccggagccaaggcagatgtggtggaggtaggctacttcggagccggccagttcattccctgtgaggaactggaagccggtatggtaggctatatcacggccagcatcaagaatgtcagggatacgatggtgggtgatacgatcaccgatgcgcagaatccctgcaaagaacccctcccgggatataaaaaagtgaccccgatggtttactgcggtctctatccggccgacggcgcaaaatacccggatctcagggatgcactggaaaaattacagttaaatgatgcctccctgttctttgaaccggagacttccattgcgctcggttttggtttccgctgcggtttccttggccttctgcacctggatattatcgaagaacgtctggaacgggaatataacctggatttggtgacgacggctccgggcgttgtataccgtgtccacaagacgaacggagagatgatggagcttaccaatccgtccaaccttcccgacccatccgagatagaatatatggaagaacccattgtatcggcagaaatcatggtaacgacggaatttgtcggtgctattatgacgttgtgccaggaacgccgcggagtctatctgggcatggaatatattgaggcgacaagggcgcttttgaagtatgaacttcccctcaacgagattatttatgatttctttgacgccctcaaatcgcgctcccgcggatatgcgtcctttgactatgagctgaagggctacgaacagtccaagcttgtaaaactggatatccttgtgaaccgcgaggaagtcgatgccctttcatttattgtattcgaaggttcggcttatgagcggggcagaagaatgtgcgagaaactgaaggacgagattccgagacaccttttcgagattccgattcaggcggccgtgggcggcaaaattattgccagggagacagtcaaagcgatgagaaaagacgttcttgccaaatgttatggaggcgatatctcacgtaagagaaagcttctggaaaaacagaaggaaggcaagaagagaatgcgccagatcggaaacgtggaaattccgcaaaaggcattcatgagtgtgctgaagctggacgaggaatgatgttccggcaaaaataattaaacaatcaggcgggaacgatggaaaataacaccccattagaactatatatccacatcccattctgcgttaaaaaatgtctgtactgcgacttcctttcctttgcggcggacgaagtgaccagaaaaaaatatgtggagcagttgattaaggaaatagaaacatgcgggaccagaataaccgggcgggacgctgacgcggccttcccggtgatttctgtgtttataggaggggggactccgtcttctctctgcccggagcagatttgcgctgttatgaacgcggtaaaggaaaatttcagattattgccggatgccgaaatcaccatcgaagccaatcccggtacactcgacaataaaaaactcagagcttacaaaaactccggaatcaaccggttaagcctcggccttcagtcggccaatccaggcgaactgagggagctcggacgaatccattcctggaacgaatttcttgagagttaccgtttagccagagaagcaggctttgataatattaatgttgatttgatgtcggcactgccgggacagagctttgaatcttatgcggatacactggaatgtgtcgcgctcctggaaccggaacacatctctgcatacagtcttatcatagaggaaggcactccgttttatgataaatattcgggcagggcagaagttcttccggatgaggaagaagaccgcagaatgtatcaccacacaaaagaatatctggcggaaaaaggttatcaccggtatgaggtatcaaactacgccaggccgggcagggaatgtatccacaatgtgggatattggaccggggtcagctatctgggaatcggtctgggagcttcctcactgatggaaggacaacgtttttccgtcatcagagagatgaatgattatctggatcttagcagggaagagctggcggagggccgccagtacgaaaaccgggaaatcctcacggaacaggatgagatggaagaattcatgtttctgggtcttcggcttacggaagggattgccgcaaaagattttaaaaagcgcttcggcttaaatatagaagaaatatatggaatgaccattgggaaactgatggaggacggcctgatggaaatgacgggaacaaaagaggacagaaggtacaggctgagtgaatttgggctggatgtcagcaactgtgtactggctgaatttctgttgtagcggaaatctttcgttaccattaaaatcactgcgcgatagccggctgccggctgccactaccttttcgcacagtcagcgcagcaaatgcgcagacctgactgaattgttaccggcacgccgctttttggcgggggtggacagtaaccagcagcaatctttacaagtatcagtgtatttgttattatagattgagtttcactgtatcattaacagtactgcaataagagcaatatggaagagaaaaaaagaagagttataaagaagagtaataaaaagagtttcatctgggaggaaatgagtaatggaaatcacaatgacgcactatctgattgtttgtcccctggtttttctggccggactgctggattcaatcgcaggagggggcggactgatttccctcccggcctttatgattgccggagtgcctccacacatggcccttggaacaaataagatgtgttctacaatgggaacctccatggctacataccgttttgcaaagaatggctacattcacctgaaaaaggtaatctggttcattgccgcggcattggttggctctacgatcggttccaacctgaccctcttaatgaatgaaaagatagtggagtacatgatgatcgccgtgcttcccattgtcgctttctatgtgctccgcaataagaggatgggagatgactcgcaggcagggacgataccggccaaaaagtcatttatcattgcggctgcagcggctttggtagtcgggacttatgacggtttctatggtccgggaacaggaacctttttaatcctcattcttacgggcgccgcaaaatatacgatgaaagaggcagcggggacaacaaaggccatcaacctttcttccaatgtcgcggctatcgtcacattcatcataaacgggaaagtattatatccccttggtctggcagcaggcctgtgcagcattgtgggaaattacatcggttccggcctggtgctctcgaacggtcagaaaatcgtgcgtccggtggtactgattgtactgaccatcctgtttggtaaaattttactgggaggatgacacagacggaatgacacacggaatgacacaggtagtcagtacgtaacagatgaagttactgttcacgggtagtatcccgcgaggtgttttcgtgtgcagtttgtacgaaaattccgagttacacggcacgacgcgatgaaaagtaaatttttcaccacaatcaacggcgttttctgccgtttctgtgcatcgcggagcgtgttactggccgcagaactgcgcttttggcagggctgcgaacagtaaccggttgacatgaatttgatatttggcatataaacagcaaacaaaaaagaacggatataacggagtaaaatccggcgtatttatggaggaaatcttatgaagtggaagaaattcaccctgacgactacgaccgaggccgtagatttaattagctgtgccttcgatgaaatcggaatcgagggtattgaaatcgaggataatattcctcttacggaaaaagagacaaaagggatgttcatcgatatactcccggagctgcctcccgacgaaggaatagcgaaagtcagcttttatctggacgacgatgccgatgtaccgggcatgcttgaaaaagtaaatgaagcgctggaagaattgaaaatgtttaccgacctgggcgcatgtacaatcgaggcatcagagacagaggacaaagactggattaacaactggaaacagtattttaaaccatttacagtggatgatatcctgattaagccaacctgggagacgattcctgaggagcataaggacaagctgctgattcagattgatccgggaactgctttcggcacaggcatgcatgagacgacccagctgtgcatccgccagcttcgtaaatacacaggcagtgacacgaaggttctggatgtggggacaggaagcggaattctgggcatcaccgctttgaaactcggggcgaaagaggtattcggaaccgatctcgacgagaacgccatcacggcagtgggagaaaatcttgaggcaaacggtatcccggccggattatttaccgttcttcagggaaatatcatcgatgataaagaggtacaggacgccgcaggttatgagtactacgatgtggcggttgccaatattctggctgatgttattattatgctccagaaggaaatcccggttcatataaaaaaaggtggaatttttatcacctccggtatcattaatatgaaggaagaggcggtcaaagaggcttttgcagccaacagcgcctttgaaatcattgaggtgacctatcagggagagtgggtatccataacggcgcgtaagaaataggtaacagttcatgatgtctgaacggacacagaatatagaggaaaaacatgtatcatttttttgttgaacaggaacagataggggaaggcgtaattgcggttaccggacccgatgtaaatcatataaagaatgtactccggatgaagccgggagaacgggttcttatcagtgctaaggccggcggtgattatctgtgtgtaacaaaagaactggcgcaggacaagatcctgtttggaatactggagaagagtgagagtgaaatggagctgcctgccagaatccacctgtttcaggggcttcccaaaggtgataaaatggagctgattatccagaaggccgttgagcttggcgcattcagaatcattccggttgagacaaaacgggtagtggtgaagcttgattcgaaaaaagaagaggcgaggataaagcgatggaacgcgatatctgagagtgcggcgaaacagtcaaaacggagcatcataccggaagtaacaggagttgttaaatacaaggatgctctgcagatggcagaagactttggacttaaaatgattccgtacgaatgcgcaaagggaatggaggagaccagacggcttcttcagaccgcggaagcgggaatggatattgccatatttatcggaccggaaggcggctttgaagaagaagagatacggcaggcaggggagaggggagtcagccctgtctcgctcggcaggagaattttaaggacagagacagcgggcttgtgcgttttgtcggccctgatgatttctctggaccgttagacgtccataaagcagaaagaggaagaaaaatggaagcttattttgataattcggctactacgcaggtttttgactgcgtaaaagacgcggtagtaaatgccatgaccatggactacgggaatgcggccgcccgccatatgaagggcgttgaggcagaaaagattataaaagaagccagaagagagatagccaattcgctgaaggttcaggaaaaagaaatcctgttcacatcaggagggacagaatcgaacaacctggcgctgattgggacggccctggcgaatcagaggacaggaaaacatctgattacaagcgcggtggaacatccgtccgtatataatacaatggcctggctggaggaacagggctttgaaattacctatcttccagttgattcctttggctgcatttccctggcggagcttgaggaggcggtaagggaagatacgattttggtatccataatgtacgttaataatgaaatcggcgctgtggagccggtggaggagattgcccgctgtattaagaataaaaacccaaaaacctattttcatgtggatgcaattcaggcatacggcaaatttcagatacgccctaaaaagcaggggattgatttgctgtcggtaagcgctcataagatacacggtccgaagggaatcggctttttatatattgatgaaaaagtaaaaatccggcccattgtattcggtggaggtcagcagaaggggatgcgctccgggacggagaacgtgccgggctgtgccggactgggggcagccgtaaaggagatttataaaaatcatggggagcgggttgagaagctgtatacactgagggaacgcctgattgccgggctgaagacaatcgatggtgtgacgattaacgggcatgaggacagacaaaatgctccccaggtggtcagtgcaagctttgaaggaataaaaagcgaggtgctgctccatgcgcttgaggacaggggaatttatgtgtcatccggttcagcctgctcctcgaaccatccgggagtgagcggaacgctgaaggcgattggcgtaaaaaaagaattgcaggattccacactgcgtttcagcttcggcgcattcaatacggaagaagaggttgattatgcagtagatgtgttgaaagaactgctgcccgtactgagacgttacagagccagataaggttaccatttaacagataaggaaacagagaggaaatataaacatatggtacgttcatttttaataaaatacgcggaaattggggtaaaaggcaagaaccgctatatttttgaagacaagctgacttcccacatccaccattccctgaaacgtctggacggagatttctccgttatcaaggagtcgggacggatttatgctcatgcatcttcggagttcgactatgatgaggtggtatcggctcttcagtgtgtgttcggaattgccggcatctgtccgatggtgcagatagaagataaaggatatgaggatttaaaggaacaggtcctgaaatttattgacgagacgtaccccgataaaaatttcacattcaaggtggatacgagaagggccaataagcagtacccccacacgtcggatcagattaaccgcgatttgggagaaatcattctggagacatatcctgagacaaaggtggatgtgcatcatcccgacgtacttcttcacgtggagatcaggggaaaaaatataaacctttactccctggtaatcccaggcccgggcggaatgccggtgggaacgaacggcaaggctatgctgcttttgtcgggcggaatcgacagcccggtggccggatatatgattgcgaagaggggggtgacgatagaagccacttacttccatgctccgccgtatacaagtgagagagccaaacagaaggtgatagacctggcgaagctcgtatccagatactcgggaccaatcaagctccatgtagtgaattttactgatatccagctttatatctatgataaatgccctcatgaggaactgacgattatcatgcgccggtatatgatgaagattgcggaggagctggctaagaaagacggctgtctcggccttatcacgggagagagtatcggacaggtagcttctcagacggtgcattcgctggctgtaaccaatgaagtgtgtacacttcccgtatttcgtcctgttatcggatttgataagcaggagattgtggatatatcacagaaaatcggaacatttgagacgtccattgagccgttcgaggactgctgtacgatttttgttgcaaagcatcctgttacaaagccaaacctggatttgataaagaagtcggaaacaaaactggaagaaaaaattgatgaaatgttgaaacaggctgttgaaacagccgagattatacggtgttgagaaaacgggagtccggattttgggactcccgcttaggaaaaactatgttgaatgggacgtgcttttcagcgttaaaacagggcgtatttgtttaaacgatatatggtgctaaaattgtgagaatgtcattgatctctgtttcggaatggatgttcaggtcgataggcttggacaaatccaggctgaatatacccataatcgatttggcatcgattacgtatctgccggatacaaggtcaaaatcgacattaaattttgctaaatcgtttacaaaagatttaactttatcaattgaatttaaagaaatacgaactgttttcatgaaaaaacctcctcttgctgctatgttatttcagctcttatgctggtaaaatactaactctatactaccgggatatggagcaaaagtcaagagagagattgtatgaaatcaggaactttaaagctaaggagaatgacaatgagaaaagcagcactgcacaacctaggatgcaaggtaaacgcttacgagacggaagccatgcagcagctcctggaagatgccggctatgaaatcgtgccttttaaggatggggccgatgtatatataatcaatacatgttccgtaactaatgttgcggacaaaaaatcaaggcagatgcttcaccgggcaaagaaaatgaatcctgattccgtagtggttgccgtgggctgctatgtccaggcagcgaaagaggatctggagaaagacatggcggtggatttgataattggaaataacaagaaaaaagatctggtgggtcttctggaacgatattttgcagatcgggacgacagggaggaagtgatcgatatcgcggcaaccggtgagtatgaggaacttcatatccggaaaatcgcagatcatacaagagcctttattaaagtgcaggacggctgcaaccagttttgcagctattgcatcatcccatatacccgtggccgggtgagaagccgggcgataggggatgtggtgaaggaggtggaaggacttgcggcggccgggtataaagaaattgttcttaccggaatccatctcagttcctacggcgtcgattttccggaggaaaagagggaaaatcttctgagtcttatcacctgtctggataaaatccagggaattgaaagaatccgcctcggttccctggaaccgcgaatcataacggaagaatttgtttcggctctggccggtcttaagagcatttgccctcatttccatctgtccctccagagcgggtgcaatgcaacgcttgcaaggatgaaccgccattacactgcgcaagagtatctggagcgctgtgtcatcctgagaaagcactttgataatccggcgatcacgacggatgtgattgttggatttccgggggagaccgtggaagagtttgatgagacgaaaagattccttgagacggtccgtttttatgaaatgcatatctttaaatattccaagcgggagggcaccagggccgcagtcatggaaaatcaggtcccggagcaggataagtcggtccgcagcgatatcctcctaacattagaacataagatgtcggatgaataccgtgagtcatttctcgggaaagagacggaggtgctgctggaagaaaaggtcgtgattggcggacaggcctatatgatgggacatacacggcaatatgtaaaggcggcaataccgtttgaggaagggcttaagaatacaactgtaaaaggaaggctgacggagaagctgtcggatgagattttgcttttgaaatgaggatttagttaagcaggtgaggacgccgccggtacggccagcggacggggtggtgggtggtgtatatgagtctttcgtcccggggaagattgtcgtggtatggggctgcgggcgaagataaagtctgcggagcacgctcccgctctgtgaaatgcatcacgctgctaagctcggcaggacctcgctaatcagcgatggatttcaacggcatccgcagactttatcttcccctccgccccaaaaccatgttttcgccgggacgaaagactccgccgggtgtatcggccccgtccgctggcctgcggccgctgatagtctcacgcgttaagtgcgggggcggaccttgtcgaggccactcagcgcttccgtgtgcgggaaatacgatataccttcaatgcgcatttttatataattgcggaaggtttgatttcagtttgccggaaacacgtggtggccgcgacagggtcctccccatttaaggttagagacaatcagcgcccggaacggaccatgtccggtgtcgcgaaaacttccgcctgagtcttccgtccctgcgataacctgacccggggaagtaggcggaatcaattgcggagggggacatgggagtccgccggtgcttggcgaggtccctcacgagcttagcactgttgcgcactccaaagagtgcaaacggtccccgcagcaattcattccggccggattcccccttcacgacaacctacccacggggacggaagactcagacagactcccccaccacaccggacatggtccgttccggacgcgtcctccaacctcagttaaatctccatttggtatcgtgaaaatttcccttgccgaatattggtttttagggtagaatagatgagagtagtttaaaggacgtgaataagatcatgggcgatatcagtaatacacaattttttaaagcagtacaggaagagaagaagctggaagtaagccaggttttagagcaggtttatgtcgctctgactgagaaggggtacaaccctatcaatcagatggtgggatatattatgtctggagatccaacatatattaccagccacaagagcgccagaagcctgattatgaaggttgagcgtgatgagattctggaagaactgatgaaagtttatgtggagacaaaactgaaataatcaagcggcaggggacaacccctggcggaaggttttgggcgatacaggattttttgcagtgcggcgcgggaaatgtgcgcggcgcagacttttcagaatggacaataacaggattccggagtatacgacagcgtaagaatgataagagaggcaggacagttggcaatatgccagcttgttttgttatgggtaaaacagcttatgagagtacttggactggattttggttccaagacgaccggggtggcggtcagtgatccgctgggttttacggcccagggacttgagacaatcacccgggaggatgagaacaaactgcgccgtacctgtgcgcggattgaagaattgattcgggaatatcagattgaaacgatagttttagggtatcctaagaatatgaataacacatcaggagagcgtgtggagaagactcttgcattcaaagaaatgctggagcgccgcaccggtctgtctgtgattttatgggacgaacgtttgactacgactgctgcagagcagattttaatagaaagcggagtgcgccgcgagaacaggaaagcagtgattgataaagttgccgcttcccttattttgcagggctatctggactcattggctatcagcaaggtaaatacgcagccggagaagtagtgcggcaggcggccgggagtccggcgcctgcgggcaggaaaggaagaacaggatggatacgtttgacaaaatcatggaaaatagtgatgatatgattacgcttcagacagatgacggagaaactgtcagcttttatgtactggaagagactaagatgaatggggaaacctatcttttagtgagcgattcgaaagaagaagacggcgactgctatcttttgcgggataaatcaaaaccggaagacccggaagcatcttatgaatttgtggacgatgacggtgagcttgattatatgtccaaaatttttgaagagcttatgagtgatctgggagttgaaatcgaaaaataatgaaacggaaaataaagacatacggaggtgcaatctttgaaacaagagaataaacataataaggtaaagatcattccgctcggagggctggaacagatcggtatgaacatgactgcctttgaatatgaagacagtattattgtcgtggactgcggtctggcattccccagcgatgacatgctgggaatcgatctggtaatcccggacgtgacctatttaaagaataatatcagcaaagttaaaggctttgtaatcactcacggacatgaggatcacatcggagccctgccatacgtcctgaaggacatcccggccccggtatacggaacaaagctgacaatcgggctgattgacaataaattaaaagaacacaacatgacaaagacgatcaagcgcaaggtggtaaaacacggccagtcaattaatctgggctgctttaggatcgaatttgtaaagacaaaccacagtatcgcggacgcatctgccctggctatttttacgccggcaggcattattctccacacgggagattttaaaattgactacacgccggtattcggtgagccggccgatcttcagcggtttgcagagcttggcaaaaaaggtgtgctggcccttatgtgtgacagtaccaatgccatcaggcctggatttacgatgtctgagcggacggtgggacggacctttgattccatttttgccgagcataagaacaaccggattcttgtggctacctttgcctcgaatgtggaccgtgtacagcagattatcaattcggcttacaaatacggaagaaaagtagttgtggaaggccgaagcatggtcaatgtcatcggaacggccagtgaactgggatatatcaatattccggaaggaacgctgattgatatagagcatctgaaaaattataagaaagaagacacggtattgatcacgacgggcagccagggtgaatctatggcggcattatccagaatggcggcaagtcttcataaaaaagtatccattatgccgggagatgtggtaatattaagttcaacaccgattccgggtaatgaaaaggcagtgtccaaggtaatcaatgagctttccatgaagggagctgaggtgattttccaggatacccatgtatcgggacatgcctgccaggaagaaatcaagctgatgtattccctgatacgtcctaaatacgcaattccggtacacggcgagtaccgccacctgatggcgcagaagggactggccgaatccatgggaattccgaaggaaaatgtaattatcatgtcttcgggcgatgtggtggagattggcgatgagggctacaaaattgccgatcatgtacaggccggagggatactggttgacggtctcggaattggcgacgtgggcaatattgtcctgcgtgaccgtcagaacctggcgcagaacggtattatcatcgttgtgcttactcttgaaaaatacagcaaccagcttatggcaggaccggacattgtctcaaggggatttgtctatgtcagggaatcagaggatttgatggacgaggcccagaagattgtagacgcggcggtacaggactgcctgaggcgccatgtcagcgactggggcaagattaagaatattatcagggacagcttaagcgatttcctttggaagaagatgaagagaaatccgatgattctgccgattattatggaagtgtagatagaagctgcgtgttatacagtgtgaagcagtgtctgcgttactgtttgcagaaccgcgttttttggcggcgctgtgaatagtaacgtgtttacaccgctaatgtaccagacaggagttattgcatatgagccggacaaccagagaaatcaacaggataacgactacaataatcagcatgtccgtcaggctgttattctatgcccttgtattttttcttctgtatgagggaattacgagaggctacagtctgggacatgaagtcttttcgcctacggccgtagctgaggcgccgggaaccgacaaagaattcactatcaggaatggtgaatcactgtccgaggttgccgaagagctggagaaaagcgggctgattaataataaactgatatttattatccaggctaaattttttgattatgaagtgtatccggggacctatacgctgaatacgtcgatgacatccagagatatgatgaaagcgattgatgagagcggtatagagcgtaagaaagctgctgaaagcagcgccgctgccagaacctcttccgggagcagcggggagagcggtacggccggcagcagcgctgagaataacggcagtgacgaaagcggtgaaaccaccggtgaaaacggtgcatcccgggaagacggggcggccgatgaagatggagcttatgtatcatgatagtaaatgagaggataaccgcatacatcaattctttagataggggaaacggcagtctctgcgatgaagtggaagaggaggctgtttcttcttatgttccgattatcaggaaagagacatcggctctgttaaagactcttgttgcgatgaagcggccggagagaatactggaagtgggtacggcggtaggctattccgctcttttaatgagccgtgtaatgccggaaaactgtcatataacgacaatagaaaaatacgaaaagcgtattccgatagcaaaagaaaattttataagggcaggggaagaggagcggatcaccttactggaaggtgatgcagaagaaattctgggatcactttccggcccttatgattttatattcatggatgcggccaagggacaatatctccactggctgccggtcatgctgaggctgcttccaaagggcggagtcctggtatcggacaatgtactgcaggacggcgatattatcgagtcccgctatgcggtggagcggagaaacaggacaatccatgcaaggatgagagagtatctgtataccctcacccatatggaggaatttgagacatccataatccccattggggacggtgttacaatcagtgtaaagaaatgaggagctgaattatgagaaaactggagcttttaatccctgccgggagtctggatgtattgaagactgcggtgatatacggagccgacgccgtttacctgggcggagaggcgtttgggctgagggcgaaggcaaagaattttacaaacgaggaaattaaagagggaattgcttttgcacacgaaagaggtgtcaaagtttatataacggcaaatattctggctcacaatgacgatcttcccggggtggaacagtattttgaagagcttaaggaggtaaagccggatgccctgattatatcagatcccggtgtgtttgccattgcaaagaaaatcctgccggatatggaacttcatatcagtacccaggccaacaatacgaattacgggacttatttattctggtacggccagggggcaaagcgggtggtgactgccagggagctgtctctcgccgagattaaggaaatcagggagaagattccggaggacatggagattgagagcttcatccacggcgccatgtgcatttcctattccggccgctgcctgctaagcaattattttgtgggcagggatgccaaccagggggcctgcacccatccgtgccgatggaaatattcggtggtggaagagaccaggccgggtgaatatatgccggtgtatgagaatgagcgcggaacctatatctttaattccaaagacctgtgcatgattgaacatattccggaaatgattgatgccggcatagacagcttcaagatcgaaggcaggatgaagacggccctctatgtggcgactgtagcacggacctacagaaaagcaatcgacgactatctgaaaagtccggagctatacagagagaatatggagtggtataaatcggagattggtaaatgtacgtaccgtgaatttacgaccggattctattttcacaagccggatgccatgactcagatttacgacagcaatacttatgtgaaaaactatacgtatctcggtacggtggaggcagtacgggaggacggcctggtacgcatagaacagaagaataagttctctgtgggcgagacggtggagattatgaaaccggacggccggaatctggagaaagaggttgcggccatctgcgacgaggaaggaaatccggtggagagcgcaccccacccaaaacaagttctctatgtggatttgggggcggatgcagagtgcggcgatattatccgcagaagtgagatggaggcggactagattaagacatgctctacgaaggaggaaaaccatgacatggattttggaaggtgctgcaattttatgtctgctttattatggggtaattgcgctgtattcaggcctgtcgacttcatttgccctgatatggccgacaatggcaatatttttcgtactcctggcggcgggactgcactattaccaccggcatccccagtctgtgcctcagtggctggtggtatcgactgccacattctgcacagcatgccttgtcatttttgtcgcggtggagctgctgattggatggagcgctgtcacctccacgcgccgggcggcggaatatgtgatagtgctgggagccaaagtgaggggaagcgaactgagcaattctcttaagaaaaggctggacaaggcgcttgaatatgcggagaataatccgaataccgtactggtgctttccggaggaaaaggggagggtgaagatatcagcgaggctgaggccatgtatgattatcttcagtataacggcataccggagtcccagctgcttctggaagaacagtccgtcaatacggtgcagaatattgttttcagcaaaaaggtaattgattatcaggaaaaatataaggcgatggaggccagggaaagcctgcttgacagctacaaagaaagatccgactcggtcaaaattgcggttctgaccagcaattaccatgtgttccgggccaaatccatagccaggaaacaggggatttacaacatatcgggcatagctgctcccggagatcctgttttggccatacatatgtgggttagagagtgttttgctgtactgaaagataaatttatgggtaaaatgtaagaaagtgaagaaactggttgctggtcacatcacttggctttttggcagggctgtgaacagtaacagaaactgttcatctgaacggttagcagtgaaaataaaccaatcaggaaaaggaagatgagaatgacagtgaaggaattagacgcctatcaggtaataagtgaaaaatatgtaaaagaactgaattcggagggaataatcctggagcataagaaaacgggcgccaggattttcctgctttctaatgaggacgaaaataaggtgtttacgataggattccggactcctccgtccgacagcacgggagttccccatattctggaacacagcgtactctgtggttcggaaaagtttccggtgaaggacccgtttgtagagctggtaaaaggctccctcaatacatttttaaatgcaatgacatatccggataagacggtatatccggtggcaagctgcaatgacaaggatttccagaacctgatgaacgtctatatggatgccgtacttcatccgggtatttataatgaggagaaaatcttcatgcaggagggatggcactatgagctggagtcggaggaaagccctctcgtctataacggagtagtctacaatgagatgaagggagcgttttcctcgccggagagcgtgctggaccgctatacgagaaatgttcttttcccggatacctgctattccaacgagtcgggaggggctccggatgcgattccatccctgacctatgaacagtttctcgatttccaccgcagatattatcatccgtccaacagctttatctatttatatggggatatggacatggcggaaaaattagactggctggacagagaatacttaagccggtatgacagacagccggtggattccgccatccatatgcagaagccattcgagaagcctgttgagcgtgagatttactattccatcacagagacggagccggaagagcaggcgacttacctgtcagtcaatacagtagtgggcgatgacctggatccgatccattacatggcatttcagatcctggaatatacactgatagacgcgcccggagcgccgctgaaggaagaactggtgaaagcaggtatcggccaggatatccttggcggttatgaaaacggcattttgcagccttacttctccgtcatagccaaggatgccgacagggaacagctgggggaatttcttgctgtcgtcaaagggactctcagaaagctggcggatcagggaatcaacaggaagagtcttcttgccgggataaattattatgaattccgatacagggaagctgatttcggctcagcgccgaagggactgatgtatggccttcagagcatggacagctggctttatgacggtgatcctctgatgcatctggagtatgaaaagacttttgaattccttaaaaaagcggtggaagagggctactttgagaatctgattaagacctgcctgctggataacccctttgaggcagtgattacggtcagtccgaagagaaacttaacggccatcgaagatgaaaagctgagggaaaagctggctgaatataaaaagagcctctctgatacagagattaagacgctgattgaaaaaaccagagaacttaagctgtaccaggataccccgtccccgaaggaggagcttgagaaaatcccattgctgaaacgggaagacattgaagaacagccggaaaagctctgcctggaagtaaaagagattgataatacaacggttctggctcataatatgttcacatccggaatcggatacctgaaggtgctgtttgatacaaaccgggtgccggcggaggatctgccgtatgtcggccttttgaaatcggttttgggctatgtgaatacaaaggagcatacctacagtgatcttgccagcgaaatctatttaaacagcggcggaatcagcctgagcgtgacgtcgttcccgaacctggaagaaccggaaaagtttaccggggcattcacggccagcgccagagttctttacgaaaagctggatttcggtttttctctgatcggagagatgctggcggattcgattcttgacgacgagaaacgtctaagtgagattgtggcggagatgaagtccagaagccaggcaaagctgaattctgcggcacactctgcggctgtggcgagagctacctcttacttttcggcaacctcggccttcaatgatattacgggcggaattgcctattatcagttcctggaggatcttgcaaggaattttgaggacagaaaaacagttctgatgcagaaattaaaagagacggcgggccgccttttcactgcggataacatgacggtaagctatacggcggatgacgagggattcagatatctggcgcctgccatgaagcttttaaaagagaagctgcctgagacaggcggtccgtcatatccgtttatttgggaaaaggggaaccggaacgagggctttatgacttcctcgcaggtcaattatgtggccaggtgcggaagctttgcagagagcggctatgcctatacaggagcgctgcgggttttgaaacctatcctgggttacgattatctctggctgaatgtcagggttaaaggaggcgcttacggagtcatgaacagcgccggccgttccggtgaaggttattttgtatcctaccgggatccgaatctgaaagagacggatcaggtatttgaaggagttgcagattacctggaacagtttgacgcggacgagagggatatgacaaaatatgtaataggcaccatcagcgacatggatacgcctctgctgccgccgtataaaggcgccaaggcggtatcggcctggtattccggcattacggatgagatgctggcagaggagagaaggcaggtgctggccgcacagccggaggatatccgcgcacttgcgaagattatcagagcgattttgtctaccggaagcttttgcgttgtcggtaattcagagaaaatcaaggaaaataaggagctgttcggcagcataaagaatttgtttaattaagtctgcaccgcgtttttcagcggtgctgtgaatagtaacatggagttattgaaccgttacccgaaactatatacagaagagaaacaaaaaacggtttggatgctgcagtccggcttatggcaaaactgcagcattcgcaaccggaaaattgaaggagtttgaatgcaggataatttaaaatcaggatttgtaacattaatagggcggccgaatgtgggaaaatccacgcttatgaaccatctgattggacagaaaatcgcgattacgtccgacaaaccgcagactacaagaaacaggattcagaccgtatatacggatgaaagggggcagattatctttctggacactcccggtatccacaaagcaaagaataagcttggggaatatatggtcagcgttgccgagcatacgctgaaggaggttgacgtcatcctgtggctggtggagccgtccacgtttatcggagcgggagaacgccatatagcggagcagcttaataaggtgaagactccggtgatgcttgtaatcaacaagattgatacggtaaaaaaagacgagattctcacctttatcgcggcttacaaggacatctgtaattttgcggagattataccggtgtccgctcttaaggaaatcaatatcgatgatgtaaaagactgcattttcaaataccttcccgaagggccgcagttttatgatgaggatacggtgacggatcagccgatgcgccagattgcggccgagcttatcagagagaaggccctcagaatgctggacgacgagatacctcacggcattgccgttgtcattgaccagatgaaggagcgtccgaacggactgattgacatcgacgcaaccatcgtgtgcgagcgtgaatcccataagggaatcattatcggaaagaacggcggaaaattgaaaaaaatcggaacatccgccaggacggagatacagaatctgatggacacccaggtgaacttaaagctttgggtgaaggtcagaaaagagtggcgtgacagcgatctctatatgaagaattacggttacaatccgaaagacatataggttactgtatattgaacgttactttttacacccctgccaaaaagcggcaatgctgtgaaaagtaactatagaactgcatttcagcaaaaaagtcaggaggcggaggtttgagggaattagttaaaatcacgggtatggtgcttagcgcatttccggtgggtgaatacgacaaacgtcttgtcatcctgacaaaagaacggggaaaaatcacggcttttgcgagaggggcaaaacggccgggcagtctgcttcgggcgcccagccgtccctttgcttttggcacattttccctggcggaggggcgggacgcctataatctttatggggcggagatagaaaattattttgaagacctggaaaaggatatggagtgcgcctgctatgcctcttattttgtggaatttgcggactactacgagagagaagggatcgaggcgacagaaatgctgaagctgctgtatcagtcgtttcgggcccttctgcggcccgcgattccaaacaggctggttcagcggatttttgagctgaaggctatgtcgctcaacggtgagtatacggagcgtcccggcagggcagccagcgaatcggctgtgtacgcctgggaatatgttattttctcccctgtggaaaaactgtatacctttctgctcaccgacgaagtgtttgaagaattcaggcggtgtgtcgaggataacaagaaacgctacatagacaggaaattccattcactggagatcctggatgccatcgtatgaatagcaacggttcatgctgtctgaactgtcattatgaacggggtgaaaatacccgcgggccgctgcccgtggacagtactgaattattactgaataaatacctggccgcctattgaaaataaaggaaaaagaaggtatactataaaaacttgatgcgaaatgaaagggaggatgagtgatgaaaaagtccggactgctgttagcggcggctgccgtggcaggaatgctgctgacaggctgcggtgcaagccagaaaagtacattctctccatccgtaagctgtgtatatgtggcgcaggatggttctgtttccagtgctctggtgaaagaatacgagggagatactgttaacagcaaggatctccagcagtacctggaggctgccgtcatccggtttaaccaggagaacggtgcgcaggggctggcggagaataagatgggagccgataagctgccggcttcgcttcagagcgttacggcggataaaggagttatgaaggccgtatttgattatgcttccctggaggatttgattaaattccgccagacggaggataacgaggatacaagcaatacggttacagcgctggaagtcagcaaagtggcagatgccgatgcggccggatggcttgcagagggacaatttgtcaaggcggacggaagtccggcctcggcagaggagataaaatcagacgcggctgcgtcggctgcccggattagcggcggaggcaatatcatgttttccggaaaggttctctatatgacggagggcatagaaaagaaggatgaatacacggtgacggtgccggagggcgaaaatgcccttgttgtgttcaaatagataggaggataaatttaaagatggaaaagacaatggaaaagattgtagctcttgccaaatcaagaggatttgtatacccgggttctgagatttacggcggacttgccaatacatgggattacggtaacctcggtgtggagctgaagaacaatgtaaagaaagcctggtggcagaaattcgtacaggaaagcccgtataacgtgggtgttgactgtgctatacttatgaactcccagacatgggtggcttccggccatctgggcggtttttccgatcctcttatggactgcaaggcatgtaaagagcgtttccgcgccgacaagctgattgaggactatatggatgagaagggaatcaagattgaaggttccgtagacgcatggtcccaggaagagatgaagaaatacatcgatgacaacaatatctgctgcccaagctgcggcaagcatgattttaccgatatccgccagttcaacctgatgttcaagacattccagggcgtaacggaggatgctaagaataccgtatatttaaggccggagacagctcagggtatttttgtaaactttaaaaatgtccagagaacctccagaaagaaagtaccgttcggaatcgcgcaggtgggcaagtccttccgtaatgagattacaccgggtaactttaccttccgtacgagagagtttgagcagatggagctggaattcttctgtgagccggatactgatctcgagtggtttgcttactggaaagaatactgcattaactggctgaaagcgctcggcatcaaggaagacgagatgcgcgccagggatcatgagcaggaggagctgagcttttacagcaaggccacaacggatatcgagttcctcttcccattcggctggggcgaactctggggtatcgcagacaggacagactacgatttgacccagcaccagaacacatcgggacaggatatgacctacttcgatgatgagaagaagattaaatatatcccatatgtaattgagccgtcacttggcgctgaccgtgtgacgctggcattcctctgtgcggcttacgacgaagaggagatcggagagggcgatgtaagaaccgttcttcatttccatccggctatcgctcctgttaagatcggcgtgcttcctctgtccaagaaattaaatgagggcgcagagaaggtgtataatgagctttgcaaatattacaactgtgaattcgatgacagaggcaatatcggaaagcgttacagaagacaggatgagatcggtacgccgttctgcatcacctatgactttgattccgagacagacggagccgttacggtaagagatcgtgacacaatggagcaggtgagagttccgattacagagcttaaggcatattttgaggacaaattcagattttaaaatagttactgtttacatcccgccgttttttgggcgggatgtgagcaataacacactactgacatatgacaacacagggccgggatcatcgatgattgattccggccctgtttgaatgaaagacggtggcctgtgcgcaaagcgcgcctttcaccgctttggaggaagcttgatggcgaagcgaatctgcccgggatgcaggaaaatatatcctcaggatacaagcgtatgcccgcagtgcaaaaaacggctggccgatattgaatatgactttgagctggccctttccatgataaaggaaccggttcttctgacaggcagcacggacacggagcttcaggccctatatctggaagagggcctgaggcggaaaaatatccctttctatgtggaggaaatgaaaacagcggtgccaaccggaaattaccgggaacacacggtagatataatcccggttacaaattattacgtggataaaagcagtctggatgaggcattggccgtcctgaaaaaagcggaggaggaggctgagatagataatgcacagccggtaatctatctcgatatgccggaagaggatggggaagatgaggaggacgatgtcataccggatggaagcggcggagcattccgaagagttttttgcggaatggaaccgtcagcccggtttaacgtcctgattataggacttgtagcgggatttgccgtactgggcttatttttagctctgatttctttgggataaagacgaatacagatgaaaaatttctttgcttgtctgattttctctttttcatatccctttctgtgaaattcaactaaaattagaagaaaagcgtgcttttctagtgggctaacactaaaatctgatatgcataccagcctgcggctggtcgttggcagacaacactaaaattagccacaaagagagagtatatagcacagtggtgttttatgaacgaaactatcaacagctatattgcggtcttttagcgtaatgtgaaatactgcaattattttagcgtaactgcgtgaaaagtacaagagaacaggaggcggtccgctccacagtgtttcaatgatgaaaatttacaaattatttggaaataaatgaagaaaacccctttactagaggcgagtttatgttataatattcacgatgggcggattgagcaggcgcatatccagaggcccattgcagcgtcatcttgtatgggagcagcagtggacacctggatatgcgcctgtaagagcgggacttaagcgtacatttaagcgtctattggtcacggaggaaactgtagccaataggcgtttgaatgtgcgcttgcgagagcgtaacgcggacggacaggcgagggtcttttgtccgcgggaattctcaatcctttgctcatcgcagcatatcaatgttaacacataaactttaggaggaagaaaacttatggcaaaatgggtttataagttcgaagaaggcaatgcatctatgagaaaccttcttggaggcaaaggctgcaaccttgcagagatgaccatcttaggaatgccgattccacagggctttactgtaacaacagaagcttgtacagagtactacaacagtggaaaacagatcacacaggaaattcaggatcagattttcgaagctatcacatggttagaggaactgaacggcaagaagttcggcgacactgaagatccgttattagtatctgtacgttccggcgcccgcgcatccatgccgggtatgatggataccatcctgaaccttggtttaaacgacgttgcagtagagggctttgcaaagaaaacgggaaatccaagatttgcatatgattcttacagaagatttatccagatgtattccgacgtagttatggaagttccgaagtcccatttcgagaaaatcatcgatgcgatgaaagaagaaaagggcgttcacttcgatacagacctgactgccgatgatttaaaagagctggctgagaagttcaaagctgtttacaaagaggctatgaacggcgaagagttcccacaggagccgaaggatcagttaatgggcgctgttaaagcagttttccgttcctgggacaaccctcgtgcaatcgtataccgccgtatgaacgatatccctggagactggggtactgcagttaacgttcagaccatggtatttggtaacaagggcgagaccagcggtacaggcgttgccttcacacgtaacccatccacaggtgaaaaaggcatctacggtgagtacctgatcaatgcacagggcgaggacgtagttgcaggtgtccgcacaccacagcctatcacccagttagagaacgatatgcctgactgctacaagcagttcatggatctggccatgaagctggagaaacatttccgtgacatgcaggatatggagttcacaatcgaggaaggtaaattatacttcttacagacacgtaacggcaagagaacagctccggctgctcttcagattgcctgtgatttagtagacgaaggcatgatcacggaggaagaggctgttgtaagaatcgaagcaaaatctcttgatcagttacttcacccgaccttcaacccggctgctttaaaggccggcgaagtaatcggttccgctcttccggcatctcctggcgcagcagcaggtaaagtatacttcaccgctgatgaggctaaggctgcccacgagaagggtgagagagttatccttgttcgtcttgagacatctccggaagatatcgaaggtatgcatgcagccgaaggtatcctgacagtgcgcggcggtatgacaagccatgcagccgtagttgcacgtggtatgggaacatgctgtgtatccggatgcggtgagatcaagatcaacgaagaagctaagacattcgaacttggcggacacacatttgcagagggagattacatctccttagatggttccacaggtaagatttacaagggcgacatcgagactcaggaagcttccgtaagcggaaacttcgagcgtatcatggtatgggctgacaagttcagaacattaaaggttcgtacaaatgccgacacaccggaagatacactcaatgccgttaaactgggtgcagagggcatcggtctttgccgtacagagcatatgttcttcgaggctgacagaatcatgaagatcagaaagatgatcctttccgattcagtggaagcaagagaagaggctctgaacgaattaatcccgttccagaagggcgatttcaaggctatgtacaaagctctggaaggcaggccaatgacggttcgctacctggatccgccgctgcatgagttcgttcctcatacagaagaggagcaggctgaactggctaagaacatgggccttactttagcagaagtaaaagcaaaagttgacgaattacacgagttcaacccaatgatgggccatcgtggctgccgtcttgcagttacctatccggaaattgcaaagatgcagacaagagccgttatggaagctgctatcgaagtgaaggaagagacaggaatcgatattgttcctgagatcatgattccgttagttggcgagaagaaagagcttaagttcgttaaggacgtagttgtggaagtagctgagcaggttaagaaagagaaaggttccgatatgcagtaccacatcggtaccatgatcgagattcctcgtgcagctctcacagcagatgccatcgctgaggaagcagagttcttctccttcggtacaaacgacttaacacagatgacattcggcttctcccgtgacgacgccggcaagttcctggattcctactataaagcaaaaatttatgagtccgatccattcgcaagacttgaccagacaggcgttggccagttagtggagatggcagttaagaaaggccgtcagacacgtccggaccttaagtgcggcatctgcggcgagcacggcggagatccttcttccgtagagttctgccacaaagtaggcctgaactatgtttcctgctcaccattccgtgtgccgatcgcacgtctggcagcagcacaggcagcattaaataataaataattagcaataaataaagcgaaagccccagagttgcagctatggggctttctatatgcttagtgtctccaacggttccaggattcaatatctccatagaacacattcaaatcaataaatgtttcttccccggcatatccattcagccgtccccggttggtatactgccaaaagcaccaatctgcctgagaatccggctttgtaacaacatttcggatccataggggatattcgtcgaaatggcctttcaaataagtttcccatacatcttctgtagaatagagaacgggaggtttatgataatattcctcaagccggtccagcataatctgcagctgctcccgcacagactccgggtccggcggattactttttttatcagcataatactctacatcaactgcagggggaagcattccaaaccggtttcccaccgtatgaataaaatggtccgcctgggtatcaccgctgctgtcaaagctgaaaaaatggtaggctcctgccgccaggtcggtcttaccggactcttcccagttatatgcaaacctggcatctgtatggctgctcccctctgtagcttttatgtatgcaaacattatattttgctgtgccagtaccggccagtctacttctccctgatagtgggacagatcaatgccggacacaggatactgtttttttgaagggttgtttaacagcagatatccattgtaaatgcaaaatccatatccaagaacgcctataacgaaaagcagcaggattaccggtatcgccatgatggttattcgtcttttctttccgtttctgtcgataattcgttccacacggcctcctcctgctgatgtctgtcacaatgatattggtcaaaccgggagcagtacaccagccttaaaaatcattgaattcaaataattcaaacaattctccctcaagttcaaaaacatcgcggatcggaacacgcatcccgtcttccaagataaggagctgccgatagccatcaatccgctttatgacaccggtaacggaaatataggcaccccctgctttttttcatccggctgaaagtaggtcagatggatcacaggatgttcatccagtctgctgcaaagaagtttaagcctttcatccagtattgtctttgcggtttcgtccagttccacccgttcctcggtccggcgggccgtttcctgaagcgccgcataatgaccggtcagggctgagaagggggcgaattgcgccgcccggtccgatatggacataggcggatgggatttggaaacgggatgagggaggtgaatgatatcctcataatcacggggagatttatttttgccgtccatgatcattcctttcaggagacccattatgcctgatggcctccgatttgattattgcgctgtaaggtcatagccccgtcttccaggttcatgccctttaaaactgcattttttccgtatttctttttgatggacagcatagcctgctgtatctgtttttcttttttcaacgcctctttttcttcctcctgctttttttgaagcgccgcatagtcggtgaacaggtctagctgttcgaagctttctgtctgtggaattgcattttcatcaatcacgtgattggcggaaacggtaattctccggatcagaagatttttattaataatgcggtcgtagagttccaatgctgcgtctgtgattagtctggccgaggcggtgtgccggtcaaggttggcagtgccgtgggcgtgtttggggatacgccgtccgtattggtcggtcgtaatctctcctttgtataatttgcgtatgtcagggttggtaaggttttcgatatcatatccgatggttaaaacaatctgatcggttacgagttctttatcgattaaatcaagcaccattaaatcaatcatctcccggacaatcagcctggccttttgaaaatcgtaggcatattgcagcacctggccggaacagaggcttgaggaggcgggcttgtaggatttgatatctttcatggtgcagggttcccatccccacgcatggtcaattaacagctctgcattaattccaaacaagtgatagagcagttcttcattatggtattcatttgattttccaattgagcatctggcaatgtcccccattgtatacaggccgtgtgcctccagctttttggcatacccccggccaatccgccagaaatcagtcagcgggcggtggttccagagaagtctccggtaggacatttcatccagctcggcaattcttacgccgtttttatcaggaggaatgtgtttggctacaatgtccatggcaattttacataaatataaatttgttccgatgccggcggtggccgtgattcccgtatttttcagaacatcgaggatcattttcatggccagctcccggggggtaagccggtaggtatccagatagtttgtaacatccataataacttcatcaatggaataaacgtgaatgtcttccggagccacatagttcagataaatattataaatctgtgtgctgtattttacatagagcgccatcctgggcgcggcaatgatgtaatcgatggaaagcccgggagaagccttcagttcatccgtgtaataggaagagccggtaaattgatgatttggcgcagaaatacggcgcctggtgttggcttccctgattttttgcaccacctcaaataatctgggcctgccgggtattccgtaagcttttaaggagggggagacggcaaggcagatcgttttttccgttcggcttgcatcggctacaaccaggtttgttgtcatcggatccaggtttcgttccctgcattcagcagatgcataaaaggattttaaatcaatggctatatagatacggtcttctgatggcaaaacggatggcctcctttccggttccttattttgaaacgttatctgaacttattgtaccacaaaatggggaggagaggaagacgccatgaaatcacgcaaatataaaggaaaaatacatcctttctgtttcccatgctgctgcctgtctgtctctatctcctggtcagcccggaaaaatcaacaaaagaaagcccggatctcaccggggccgtgaggccggtgaagtccgggcttttctgtttgaagacggtggcctgtacgcagaacgtgcaggctatcgttttatacgcggctgacatcggacgccgcggttaaaattttcttttttgctttccggcatttactgtagcacagacaggcggccacaatccaggagattccctcgctgtaagggacggatggaaagccgagcggtgcgacaagaattgctgccagcgtaaggcgaactcccaggccggttatgttgcagacagcgggagtaatcacgttgccggtgccctgtaggaacccaataaacagattcagcatcccgaatatgggatagaacacggagagcataaacaggaaactctgtcccagcccggcaacctcttcgcttactccgaacaggaggataaatgattttccgcccagaataacggctgctgctatggtgacggagagcaggagcatcattttcacgctgatggaatacccctcggataccctgtcatactgtctggcgcccatattctgcgccgtgaaggtggaaacagccgaggccatactgacggcaggcagcatagcgagggagtcgaggcggtatgcggaggtgatggctgtgacggcctgaacgccaagggtattcataattccctgcaggataatgctgccaaaggacataattccggattgaagcacgcagggaagtccgagcctcgtctgttccttcagcgcctcttttgtaaagctgtgacggcatgggaatttctttaccacgcgcagcagcaggtatgcaaggacgtaaatgcaggagaaaagctgtgacagtacggtggccagggcagcccccataattccccactgaaagacagctacgaaaagaatgtctacaaaaatatttgtaaaggtagcgattacgatggcctgcatggaggtcttgctgtttcccatgccgcgcaggatcgcgctgcatatattatagaccatgacaaacggtattcctgcaaaaataatggagatataggttttggtcatagcaaagatacttccgtccgtatgcatcatcgttaaaacctgttcaataatcccaaggctcagaagagccatgagcagagctgccggaacgaggtagaaaaacgaggtccgtatggcctcgccgattttttcattatccctgcggccggtcagttgggcgatatagatggagactcctgtggtaaagccgataatgacattcgtaaaaaacattacgatgctggtggaaacaccaatagcagcaacggcattttcaccgataaaattgccggctatcatggaatcggctatattgtataattgctgcagcagactgctggctaccagtggggcagcaaactggaatagtattttagtgatatttccttttgtcatatacggctcctgatatgtaacggtattgtcagccggaggggctgatttgatctcatcatatcatacgcccttgaaaaagtcactatttttaaaggttactatttcctgctgccgcagattcagttttttttcgacaaagccgctttttcaagctctgcctgcagaaaacgccgggcggaggcaggtgacggaaaaggccggcgcttcaggccaaggatataggtaacggcctcttcccactcttccaaagagtaattgtcaggagagagcctgtccagggcatgaaaaatcttcctgaagctatgcgggtcatgtaaatcagacagataactgacaccggcctccgataccagttcatttagtaaattttcgttcaagactgtgtctcctccctgctttcagtttatatggacttaaatatccgcagacctctaaagtatcaactctaaatgataggaggtacggtacacgggtttattattgccgttttgtgagttaccacataatgatgattatgtggttaaactcccgcaattctggcatgcaggacaacccccgcgacatatttgaaatgaaaataagtataaaaaccagaccggaaaaaaatctgagtgttccggtctggttttcatgctttgacaaaaatgaaaggtatcaatatattgtaatttttgtctcttcgtgttaaattaatatgtagaagaaccgataatcgaatttttttataccacataatcatcattatgtggtatttttatgtgcgtgtaaaaacaagtcccatccggctgagctgccgggaatgcatcagtccgctttccattgtataaatacgggtggttgatacattggaatggccaagtaaatctgcaagtcttgacagatccttttccagcgcataatacgtgcgggcgaacaggtggcgcaggttatggggaaatactttgcctggttccacacctgcgctgtcacaaagcgttttcatatccttccagatattggagcggtcaagagggcagccgtttctggtgcagaaaatgattcctgcgtcaataccacgctccctgcaataatgccggagcgcccggcacaggtcgggagggagaaagataatgcgtgtcttacccttacagtctgcctcagctcttcccgtttttgcagattccgcagtaataaatttcagttctgagactcggataccggtggaacagatagtctggagaagaagagataatctgttattctgcctgttttctgcggcttttataagcctgcggtattcttctgcggtcaactcttttttagggtttgaaaagatttggcgttgaattttaagcggctttactttcaggcccggaagttcgagccagtccagaaatttgttgacggacgccagcatggaattgacactggccggtgcatgtgtctgtgttaaatgctttttccagtccagcagcgcctctttgtccatcggctgtccgtctagaaaagtaaaaaacactttcaaatcccggacatatttcgtgattgtgtttctactgcgttcctcctggtgcagatagttttgaaattcagcaatccgtgtacaggaaaagatttcatcaggtttgttttgtccttgttccattttcatttcctcacttttttggctaatataatatggttattgtacctgaaaacgcctttgctatactttttgtaattcaggcacactatttttaccggcagaaatttgcaaataacagtagttatacagccaatggttatgatatactatgagcacttgatgaggtatcccacgaatctagtgcgagtcatatctatacactcagcgaggtatttaacgagcatagtgaataggatatactatgagcacttgatgaggtatcccacgatactggtgcgagtcaagttatacaaaattaaaagatgaatggattatttttaagtaaaaggagagaaaaatcatgctgcaatttcatggaagtgaagaatatatcgcgtcggacgaactgatccgcagtgtcaatatcgctgctgctttaaagaaaccgctgctgttaaagggagaaccgggaaccggaaagacgatgctggctgaagcgattgcaaagtcccttggaatggagcttttaatctggaatatcaaatctaccacaagagcgcaggacggcctctatgtatatgacacggtacagagactttatgacagccagttcggaaccgagggagtaaatgatatcggcaaatatatccgtctgggcaagctgggggaggcgtttaagcgtgaaaagcagacggttctgctgattgacgagattgacaaggccgatttggaatttccaaacgatctgctctgggagctggacaagatggaattttatattcctgagacaggggagacggtcaaggcaacggtacgcccaatcgtcatcatcacgtcaaacgcggaaaaggagctgccggatgcatttctgcgccgctgtatcttccattacattgcatttccggatgcgtctatgatggaacgtatcatcaaggctcattacccggatttggaacagaagctgattgacggcgtgctggaggcattttataaaatcagggacatccggggacttcagaagaaaccgagtacctcggaggtactggactggattcaggctttgtcaattggaggcattccggtgaaaaagcttgagagggagattccctttgccggtgtattgttaaagaagacagaggatttaaagcaggtggagcgaaaaaatgtttactgattttctttatctattgcgtgcgcagggaatgaagacaggcctgaatgaatggaacagcctgatggacgccctgtccatgaatctcaacgaggccagcctgacggaattctattatacggccagggcggtgcttgtgaaaaaggaatcggattatgacaaattcgaccaggcgtttctggaatattttgaaaacgtcacgacatatgacagactgcctcaggaagttctcgactggcttgcaaaagcgagagagcagacgccctatgacaaagatgaggtggacgcccgctttgagggccttggtctggacgaaatccggaaaatgatggaggagcgcttaaaggaacagcatgagcagcaccacggcggaacgaaatggataggaacgggggaacctccgcgttcggccattccggctatagtccgaggggaatccgtgtgggaggacctggaaagaacaggagcgcccttcaggtggctgaggaacgaaactacagggatttccgggatgattccgtcctgcagaaacgccagttccagatagccttacgaaagctgcgtctgctttcctgccgtgaagacgggccgaagaccgagctgaatgtggaaaaaacgattgaaaaaacgtgtgatcaaggcggaagactggagcttgtcatggaacgtcccaggaaaaaccagacaaagcttcttcttttgatggacagcggcggatcgatgtggagctatgctgagctgtgcaaccgtctgttccaggcagtggatcagtcatcccattttaaagatttaaaggtatattattttcacaattgtttttatgattatcttttcacaacgccttcctgttcctggagggagaaggtatcgacggaatgggtgtttaataatctgaagccggagtataaggttatcctggtaggggacggggccatggcgccctcggagctgctctaccgcggcgggagcctcgactatttccaccgaaatgacaagacgggcctctactggctggagacattaaaacggagatttccgtcctctgtctggatgaacccgattaatgagaaggtgtgggattacacgtacggctaccagacgattggcctgattcgggagacgattccgatgtttcctctgacggtaagcggcctggagaatggaatcaaagctttaaaaaaaggggaataggcggggaataagcccgttaaagacgtgataaagtgacaggaggcaagacttaaatggaacaggtggaaacgcttcttcggctgtccgacagcctggagaagcatacgatcgctgtccgcaggatgattcatcagaaaccggagctggcctttgaagaatataagacagcagggctggttatgcaggagcttcggcggatgggaataccatatgaggagagtccggtggagccgggaatcgtggcggtaattgacagcggcaagccggggaagcttttgatgctcagggccgatatggatgcactgccaatcgaagagacggcgcaggtgtcttttcgttccctgaataaaggcgtcatgcatgcctgcggccatgacgtccatacggcaaatctgctggctgtcggggaaattttaaacggaatgaaggaattttggagcggcagggtcaagctggtattccagcctgcggaggagcgcggaggcggaggccgccagatgatagaagcagggctgatggaggaacttcccgacgcttgtatggcacttcatgtgacatccgatcagaggggaaagttctatgtgggtgtcggtccggtgacggcgttctccgaccgctgtgaaattgtggtgcatggaaaagcggcccattcctcagagccgcaggagggagttgacgccgtctatattgccgcatcgatcatcgtggccctcaacacactggtgccgaagaacttaagtcccatggagcattcaactttgaatatgggaatgatatccggcggagctgcgcttaacgtaattaccgaccgggttgaaatgcatggcatgatgcgcaacgctgaagcacagaccaggagtgttatgatggaaaagatacgttccctgtcggaagggatcgcatctgccatgggcggaagctgcgaagtgaaatttgaagaggggtatgcggcggtctataatgacaaaaccctggcgaaacgggtgattgccactatcaaagagaatgaggaggcactttataaggggcttcccacaggtgagccgtatccggaaatcgtcaccggcgatcttctcagactggcttcggaggatttcggcttcttttcacagaaggtgccttcctgttatatcatgatgggtacaggcgaaggcgctccggtccacaatccggaatttaaggtggatgaaacatatataaagctggcgtcgaggacgatggccgctgttgcgattgattatctgaaggactgaaataagaaaattacatagaaaaaccgttcggacagaccaaaaccatgaaaggaaaaggcgtgttatatccggacggtttttttgcgtgcattattttcaagcttgctacagcaggtgcgtattcttaagcaggaacggaaagttctctttcaggtggtaaaactccgcgagatgtgtcgcagtcagtttaacagccagctcttcatcccgggcctcgatggcgtcggcgatcattctgtgagtaattttattggctatcacgtcggcatagcggtgggagagcatgacctccatctgcctgagaaactgaagctgatatttttccagtacaggatttttcgctattatgctgagctgaagatggaacaggtaatcatttttgatatgttccatacgctcctttccatcggaaaaatcactttcactgcatttatccgcaagaatactgagctggcggaagtcttcattgcttccgcggaaaatggcaagccttactgccatgcagtctacggcgattctcataataccaagatcctgaatcatttcgtcatcgaaagttgtgaccttgacgaaacggttcggataaattgtgaccagcccctcgctttcaagctgcttcaaggcgcttctcacaggggtgcggctgattcccagatcctttgcaatctcaacttccggaatgcgatcgccaggttttaactccatattcaatatcatattaagtatatgctcatatacaggttcagccagactggccgatgattgtgtcttcaaaaaaatcccccttatgtttcatttttaatatttaattctattatatagtaatatttaataaaattcaatcataaatgcaaaactttataaagtttaaatatatataatataaatatgcaaaactttattactaaaatctggtataatattttgtataaaacgccaattgcaataattaaatcgtatgttattatattatatataaataaactttataaagttaaaaaggatataataaaatatcggaggggatatgttggagagaaaagaaaaacaacgattacagttattttccaaaaaaattcaaatgtatacaatgaagacaatcggttctctgggcgtgggtcatgtcggaggctcattatcaattgccgatttgctcgctgtgctttacgggaaagagatgaagtatgacagcaggaatccacagtgggaggaacgggactggctggtatgttctaaaggacacgccgggccggcgctctattcggcgctggcactgatgggatattttccggaaagtgagctggaaactttgaatcggccgggaacccgtctgcccagtcactgtgacaggaacctgacaacggggatcgatatgacaaccggttctctgggccagggcgcgtctaccgcagcgggaatcgcctatggaatgcagctggacggcaaaacaaacatggtctacctgatactgggagatggggaaatacaggaagggcaggtctgggagatggcattgtttgcagcacatagaaagctttccaacctgattgcgtttgtagattacaatcatgtccaattggacggttatacagacgatatatgttccctgggggatgtgagagagaagttcgagtcctttggatggtttgcccaggatgtggacgggcacgatgtggaagcggttgcccaagcagtaaagattgcgaaatcccagaaagaaaagccttcaatgattgttctggagacggagaaagggcatggctggagtgagattgccggaaagctaaacggccactgtcccactgtttccaaggtacagctcgattcagccctggcagaaatgcaggggcatacgataaaattaaggaggggatattatgattaggctgtccgacgaaattcttccggaaaacacagagatgagaaaagctttttgtgatacgcttatggaattggcaggtgaggataaaaatgtcattttaatggacggagatttgatgggagccatgggaaccaagccttttgcacaggaattcccggaacagaccatagactgcggcatccaggaagccaatgctgtgggcgttgcggcaggattgtccgcagtcggtaaaataccatttgtgcattccttcggcccctttatcacaagaagagcctgtgatcaagtatttatgtccggggcctatgcgaagttaaatgtcaaactggttggttcagatcccggtattacagctcagattaatggcgggactcatatgccgtttgaagatatgggtattatgcggggaatcccggagatgacgattgtggagccgaccgacattgctatgctgaaatcggtgctgcggcaaatgaaagagaattatggaatgtactatatgcggttggtaaggaaatcctgtatgaaaatttatgaagaaggttcagaatttgaaataggtaaatccgtaatgctccgagacggtggtgacgcgacggttatcgccagtggctattgtacggcacaagcgctgatagcaggagaaatactggacggagaggggatacatatccgggttttagatatgtttacctggaaaccggttgacgaagaggctgtgatactggcggcaaaggaaaccggcgcagtagtaacggcagaaaaccacaatgtaatcaacgggctgggatccgcagtggctgaagttctggttaagaatcacccggttccggtggagatgatagggatacaggatctgttcggggaggtagggaacctggagtatctggcagagcgttttgaactgaaagccgattatattgcggcggcagttaagaaagcggtaaaaagaaagacgaagcagtaaatcagacagaggaggagaggaatgaaagcacttattaagtacaaaccgggatccggaaatgtgagggtggctgatgtcgacatgcctgtaatcggaccggatgaggtgcttatcagagttatgggggccggaatatgcggaacagacctgcatattcttaaagatgacagttatccggtgaagccgccggtaactctggggcatgaggtgtcgggtgtaattgaagaagtcggcgggaaggtctccggctggaaacagggggataaagtggtcagtgagacgtattattatacctgcggcgggtgttacttctgcaagacgggaaattccaatctgtgtgagcagaagctgtctatcggcagcggcgttgacggcgctatggcggaatatgtgaaagtacctgctaaaaacctgcacaatttccctgaaaggctcagctttgaggaggcatgcatgacagagccgcttgtctgctgtgtacaggccgtatttcagcataccagtcttttaccggaagattacgtagtggtgacgggaccgggaacaatcggtcttctcaccttgcaggtgattaaactgtttggctgcaggaccattgtgctggggacaaaaaaggacaggcagcgtcttgacatggctttggagctgggggcagacaaagtaatgtatgtagaggatgaagatatagcggtgaaggtgaagtcctattgcagaggaatcggcgcagatgccgtatttgaatgctccggagcggtcccggccatccggctgtccatggatctgatgagaaagggcgcatgctatattcaggtaggtatcccggcgcgggaagcgggactcgacatggggaaaattgtactccgggaatatacaataaagggtacctatgccaccaggccggtctggtgggataaaacattggaactgctgaatgccggaaaaatcagcctgaaaccgcttttaagctcagtatatccgctggaagactgggaaaagggttttaaagaagcaatcgatggggaaggatttaaacatattattgtaccatggcgctgtcagggtacggaagaaatgggagagtgagcagatgagtaaaatgtctaaaattgtatttgctatatttaatattctgttgttatcatccaattatatttttgtcgcatggtttccgagctaccttgtttttggctggattccgtttcaattattgtttttctatatgtccatgctggtggctgcggctgtatgggggctttattataattgtttttttaataaacagaaacacattgatgagagatatggggaagagtaaaaagcatttacaggaggggtttcatgcgtacagaagtttggattattattggaattattgcatatgcactgtttatggtatgccacgggttttctaatttccgggcaacttcaaaatcatcggaaagcttttttaatgcggacagaggggtaaattcatttgtccttgtatgtactacggcgatttcagtatatagcgggttatcctactatgggtatcctgcatctacttacgcaaatggaatcggctatgttgctgcagcaggatgcgcggtcagcggccttttattctgtctgatgggctaccgaatctggattctgggccgcgaatacggctttcagacaccgtcggattacctgcgtaccagatactattccgaaggctttggtttgtttgtatcggttctgctggtgatttttatcgtgccatatgtggccgtacagcttatgacgatcggaagcggaattgaagttacgacaaaggggatgtttccctacctgccggcggtacttctcggaacagtctgtgtatcgcttcatgttatcgggggaggtatgaaatccgtagcctggctggatactttccatgctattttgggagtatgtgcagtttatattgtagtttattatcttgtgaaacacttcttcccggacggagggcttgtggaggctgccaacattgtaaaaagcaacccggacacggcttctatcctgagcacaccggggccaaacggaacctatacctggaagggactgttgaaccaggctctgacggcggcagttgccacgattgtatggccgcatattttcatgagatgctatattgcaaaaggaacaaagaattttaaggtaatgtcatgggcgcttccgcttgcttatgtgattcctgtatttggcctcgtaatcatcggttccttgatcggaccggcagttttcggcgcaggatttcaagacgttgataatcttttgcctacactggtcacacagtactgtccgccgcttatttctttcgtatcgattctctgtctgtttgcttttgcggtgtccacagcagattcattacttctgtctgcgagcgcgctggcatccagagatatctatgtgcgccatttttacgagttaaaaggtaaacaggctgattccaggcaggtggtgcatttcggcagagttgtgctggtggtgctgatgatagcctgcatcattgtcacggctacaaaatcaacatatataacagaatacgcctataggctgtcatcaccattctttgccatgatacttccctgtacaatcggaggtttattctggaaaaagggtacaaaggagggggctatagccggtacggctgcgggtgttatcgtcacattcctgatgacctttgtgattgctcctccgatgggattctccgctttgctctggggcttgccgttaatatcgtactatatgtgggcgtaagcctgatgacagtggttccggaggaaatcgttgaaaaatatattgtgagagtcgataagattatcagcggaagtccggagatttttgaagtgacgaacacagcagtgaatgaagcaaagaaaatgtgtacaggtgaaggacttaaagtagccgaggaaggttgatggatatgacttgtttatttcaggcatacggtatcacagtccgatatccttctgaatggaggatttacataccgcaaagccagagcttttgctggaaggacggtgtcctgaaatttgatgatgtctcaggggcggacagcagggcctccttcacactttcctgggaagacgcagggcctgttgaaggctttgctgcggcatatcttgagagcgctgaaaagaattacaaaaagaaagtgaaaggacgctgtcggatagtggaaaaaaagctggagaagctcaatgggcatgaggcaggatttttggaggccgggctttcatccaatacgcatgtgtttcgggcaatgggaaaggcactggaactgacggtaatgcagacagcctgttactgtaatacctccggccgcattattatgggaactgtgattgcagaacaaaaatattttgagaaaaacagaacattattagagggaatgttaatgggaataaagtgccattcagagaatggcagtgaggagagtgaggagcatgcgtacagcaaaattagttgccccatatcggattgaagtaggggaggctcaggaaccgcaggttaatgactcccatcaggtactcgtcagggtgaaggcagtgggaatttgcgggaccgatctacatacatttaaaggagaacggacggatgttgaatttccccgggtgatgggtcacgagctctccggtattgtgattggcgcgggggactcggtcagccgggtaaaggaaggggaccatgtaatatatgaccctgtaaattcctgcggaaactgtaggacgtgttcaagcggccacgaaaatgtctgccgcgaagtcaagtgcttcggcgtccagatggacggaggatttcaggacgtgattgcagtttcggaggataagctttatcctgttccaaaggaaattccgttcgagtgtgcagcacttgcggaaccgttttccattgctgcgaatattattgcaaaagcggatatgaggcaagaggatcgcgtggttatttttggagccgggacgattggaattgcagttttgcaggcagttaaacggttgggaaaccaggttctggttacagatatggcggtggaaaagctggcgctggcaagaggctttggggcggatgaaacggtgaacagtctgaaggataatttgcatgaagctgtcggagcattcagtcccggtggcgcagatatattaatcgatgcggttggtacggcatcaatcctgtcagaatgtattcaattggcagcaccctgtgccaatattgtggaaattggctttgatgaacaggaatctcttatccgcccgagcgatataacaaaaaaggaactgacaattaaaggctcccgaatgaactgccatcgctttgatattgtggcagaatggcttaaggaaggcttaatcacagataagatgatttccaggatttatccgctggagcagattgaacaggcattcagggacaccctggaacaggggggcacctggcttaaaacgatgatccggctatagaagcggttctgtatttaggaaagtgagtgatatgatgaaacagctgatgataaaaccggcaatttacaaatacgaaaaagccggagactttgctgaggaatttgccctgggaaagggtgatctggtcattacaaatgaatatatttatgaaccgtatttcggagggctgaatcttggctgcgacgtcctgtttcaggaaaaatacggggcgggggagccgtcggatgatatggcggaggctatgtaccgcgatatgaagggaagccacagaaggatcattgcaatcggcggcggcacggtgattgatatatcaaagctgtttgccctgaagaatgtcttgccggtggaagacttgtacgatggaagactggagattgtaaaggacaaggaacttgtcctggtgccgacgacctgtgggacgggaagcgaagttaccaatattgcaatcctggtgctgaataaaaaagggacaaagaaggggttggcagtggatgagatgtatgcagacagcgcggttctgatccctgaacttttaggaggccttccattcaaattctttgccgccagttccatcgatgcgctgatccatgcggttgaatccagcctgtccccaaagggaaatgagatgacgcggctgttcggctataaggcaattgaaatgatattgaatggttacaaaatcattgctgagaagggagaagaggccagaatcccgctgctaagtgatttcctgacagccagtaattacgcgggcatcgctttcgggaatgcaggctgcgccgctgtccatgccctgagctatcctctcggagccaaatatcacgtggcccacggcgagtccaattatgccatgtttacaggggttatgaaacaatacatggaaattaagagcgacggggagattgacaggctgaaccggtatattgccgcgattctgggctgcgggaccgccgaggtttatgataagctggaagagcttttaaatcatctgctccccaaaaaggcactgcgtgaatacggtgtaacggtggaagatctggaggcgtttaccggctcggttcttgaaaaccagggcaggctcttggccaataactttgtaccgctcgatagaaaacatatttttaacatatataatgaattgtattaaagcattaaaatacgcccgtgggggactttgccggttccagacgggcgtgttttgatgctctttaaggattgtgaaggtgcatttcttcctgtataatagtagacaggatctgaataattaagcattggcaaaagaggtggaacgtgaaaaaaacagacacatcggagatgttttcaagtgtggaggaggcgaatgaatggctggatgcaattatcgagcattcctttgacggtatctacataacagacggcaatgcaaatacaataaaagcaaacagggcgtatgagacgatcacggggcttaagaagtcagaggtgctcggctgcaatatggaggagctggtagaaaaagggattgtttctgccagcggttccctgatcgctatccgggaaaaaaggcccgtcacaatccggcaggaatttaagacagggaagaaagcgctgatcaccagttctccgatttataatgagaagggcgagattgtcatggtagtgaccaacgtccgggatttgacggagttatacagcctgagagaagaagtcgagaagacgaagctggagggaatgcgtctgaaaagggagctgagccatatgtatgaacggttcagcatcggagatcagattgttgcggtggaccgcagttccctgcaggcctttgtcatggcggataaggtagcgccccttgatacgacggtcatgcttctgggtgagacgggagtgggaaaggaagtatttgccaaatacatctattccggcagccgcagaaaggaagagagttttatcaaagtaaactgcggcgcaattccggaaagcctgattgagagcgagcttttcggatatgaaaaaggggcctttaccggtgcggaccggaatggtaaaattgggctctttgaggcggccaacaacggaacgatctttctggatgagatcggcgagcttccgatgaagatgcaggtaaagctgctgagggtccttcaggagaaggagatagagaggatcggcagttcaaagcctgtgaaggtgaatgtcagggtgatcgccgctacgaaccggaatcttgaagatatggtggaaaagaagctgttccgcgaggatctgtattaccgcctcatggtatttcccattacgataccgccgcttcgtgagaggcgggaggatatcgtcccgctggcctccagattcctggaagaattgaatggaaaatacggttttcaccggaacttctcccgagaggcataccagcttttgaatgattaccactggcccggcaatatcagggaactgagaaatatcgttgagagggccgtgataatcagcagcggagatgaaatcatgcctgacagccttcccgtattcccggccggggaccgcccctgcggggaaaaaagagagaaacagataatgctcggtcaggtggaggacttgaaggaggcaatgggggagctggagcttcggtatattaaccacgcatatgaaaaatacggcaatgtcagagacgccgccgaaagcctgggaatgacgccatccacctttgtacgcaagagaaaaaggtatgcaaaataaagtaaagaatataaaatatagaacatggaaagtaacagttcatgctgtctgaactgttaccacggaaacaggaggataagagtatggaacactatctgggaaaagagatcccgaaacttggctttggactgatgaggcttccgaaaaacggagaggaaatcgatgtggaacagacaaaggagatggttgatctgtttctggaggccggatttaactacttcgatacgtcctggggatacataggttcagaagctgctgcaagagaggccctggtgaagcgccatccccgtgaaagctatcttctggcgacaaaatgtcccgcctgggcggcaaagacaaaggaaaaggcgcagagtatgctggataaatcgctggagcgtacaggagccggttattttgacttttacctgcttcacaatctgggcgagtcgagaagccattattttgatgattacgggatttgggaattccttgcaaagaagaaggaagagggggtaatccgtcatctcggcttttctttccacgacaaggcggaggaactggataaaatattgacagcccatccggagatggaatttgtacagctccagattaactatgcagactgggaggatccgcacgtagaatccggaaaatgttatgaagtggcgagaaagcacggaaaaccggttattatcatggaaccggttaaaggcgggacgcttgccgtccttccggaggaggcggaaaacattttcagaaaagcagatccggagcagtcaccttcttcctgggccatccgctatgcagcttccctggacggagtgataaccgttctgtcgggcatgtcaaatacggagcagatgcgggataatatttcctttatgaaggattttaaaccgctgacacaaaaggagcggaaagtgattgaggaggtcagaaaagttctggaatcctatccgacggttccctgcaccgcatgcggttattgtatggaaggatgcccggaatccgtagctatttacggaacattccaggccgttaatatatttaaacggtaccaggatctgaacggagccaaaggaaagtataaatggaatacggagggacatggatggggcaaggcgtccgcctgcatcggctgcggagcctgtgaagccgtctgtccgcagcatatttccatcagggaggagcttaaaaaagctgcggaaattcttgaataattagaggttgggggtatttaagcaggtgaggacgctgccggtgccgcgaaaaccttagcctgagtcttcagtcccctgcacaattgattctggccggattccccgttcccgacgcgtcccaccttcaacatataaaaaacctcttgacttggagttaacttcaaggtgtattctgataaagacatacgaagcagaataccaaaggaggtttcaacatggtatataaagagtttcaggataagaaattatcctcactggggttcggtgcaatgcgtctccctgtgtcggacagcatcccgggtacccccatcgatgaagagaaaacggaagagatggtggattttgccctccgtcacggcgttaattatttcgatacggcctatggctatcatgacgggacatcagaagttgtaatgggaaaagtactcggtaagtacccgagggacagctattatctggctacaaaatttccgggatatgatttatccaatatggataaggtggatacgattttcgaagaacagctgggcaaatgcggcatggaatatttcgacttctatctgctccataatatatatgagaagaatatcgatccgtatctggatccgaagtacggaatcatggactatctgttaaagcaaaaggagaacggacgcatcaggcatctcggattttccgctcatgggcggtatgatacgatgaaacgttttctggaggcctatggagataagatggagttctgccagatccagttaaattatctggattggaaattgcaggatgcaaaagcaaaggtggagcttttgaacgagtaccacatcccgatttgggtcatggagccgctgcggggcggcaagctggctgagctttccgccgaaaatgaggcaaagctccatgctctgaggccggaggaggcagtgccagcctgggcgttccgtttcttacagtccataccgggcgtgacaatggttctctccggcatgtcaaacagagaccagcttgagaaaaatatcgccacctttgcagaggacaggccgctgaatgaggaagagatggctgccatacttgaggctgccgacagtatgctggatgtgcttccctgtaccgcctgccgctactgcgtgtcccattgcccgaaggggctggatattccaaccctgctttccctttacaatgagacacgttttgtaaacggcctgattacccatatggcggtggacgctcttgatcaagaaaagcggccggatgcgtgcgcgggctgtcacagctgtgaagccgtctgtccgcagcagcttgagatcgcaggagcgatgaaagactttgtcagaaagcttgcgcagccggccggattataacgtttcagaccgctgacgtttaagcctgccaagactgcttaagcctgccaagcctgcgcgtttaagaccgccggccgggaaaacgctcctcgaatacttttctcagcccgtccctgaaatcgggatgggcaatttcaatgagagccagggcgcgctgtctcaaggtacgtccctttaatttggcgattccgtattccgtaaccgcgtaatcgatatcgtttcgcgaggtggtgacggcggctccctcatccagcaggggaacaatctttgatatttttccctttgcggcggtggaggggaaggccaggatggaacggccatttgccgccatggcggcaccacggacgaaatccacctggccgccgactccgctgatttgggtgaggcccacggattccgatgcggcctggcccatcagatcgatctggacgcaggaattgacggagacaatattgtcctccttcatgacttcgaccggattattgacatagtccaccggaagcatcgccacatccgggtttccatctacgaaatcatagagtttccttgttcccatcagaaagctggctacgtattttccgggattcgtcttttttaaacggtttgtgatgactccggcttcggccagctccacgactccgtcggagaacatctctgagtggattcccaaatcttttttatcacccagaaagcggagcactgcgtccgggatagccccgatgccaagctgcagcgtatcgccgtccctgatcaggccggcacagttggccccgatagccagttccacatccccaatcaccgggggctccagcgtaagaagcggcgcgtcatgttcgacaacagccgttacgtcggagatatggattgtgcctccgaaggtgacaggcatctgtggatttacctggacaatcacggtttttgcggatttcgcagcctgcagcgtataatctacggagatgccgaggctgaggttaccgttctcatcgggaggagccgtctggattaatgctgcgtccacggggaggctgccgtttttaaaaagctttggaatttcagagaaaaagcagggggtgaagtcacctcttccttctgcaacggcttttctggtcgaaccgcccacgaacagcgaattgtgccggaaatgcttttccatgccgggggcgcagtatccggcttttcccatcgccaccatatgaacgatctcaacattctcgtactgttctgctttttcggtaaaaacatccaggaggtaggacggttctgcgcaggcgtggcctacaacgacccggtctccggagcggatcagattaagcgcctgatccgcgtccatctttttgctctgatagagttctttaaaggacatggtaattccctcctccatttaactttctttaattccggcgatatcctttgccagctttttcttcatgccgatattgccctggcgtgcaatcatgatgcgctgggcctgcggggagccggcgccgtgcatggactcagtccggtagccgacggcagcggagccgagtgtcagattttcaaccaggcgcatcatccgcatcctgtcctcggtcggtacatcattcacgccccggaaatatttgtctatgtagcggcccagcttcggatcacgcagatccttctcggagggagccgtaaccatcagtcctccggcaatatcctcggccagtctggcaatctcataggggaacctggttacattctgtttacagacattggccagcagcagatcaattaaatagttgcctgattttgtctgcgcgccttctgctgagcaggcgatgccgcagcagtacagcgtctcgtttaaatgggtcatttcaatcagtttgtctttgacatgggaggctctggcagctccgttataatcggctgccgcagcggcagctccaattaagacgtcgccgacgcctaccttgcatccgccgtaagactgtctgtgatatccggcaaaccgctccacgaggacgccggcgaattctgtttcgccgtcgaggaaaattcggtcgttcggaataaatacattatcaaatattacgagcgcttccatgccgccaaaccggctgttgcccacatcaatatcggagccctccagctttctcgtatcgcaggactgacggcccacgatcataaaaatgccttctgcatcggtgggacatgcgaaggaaaccgcataatccctgtcttcaggtcccatggactgggtaggcatgacaatcacctcatgggaattgacaaagcctgtctgatgagcctttgcgccgcggaccacgataccgtcgggacgtctctccactacatggaggaacaaatcaggatccttctgcgcatgcgggccagggagcggtcacctttcgggtctgtcatggcgccgtccacagtcaaatccttctcctgtgtatactggaggaactttttaaagttttcgaaataatgggtgccatacttttcatcaatttcataagaggtgctgtaaacggcgttgaaagcgtccattccgacacagcgctggaagcaggccgctgtcttctgaccgcagagccgctgcatttttactttcttgacgagatcctgggcgttcatgtggatgttggtaaagcggttgattttttctcccgtcaggttggaggtactcgtcatcaaatcctcatattccggcatctgtgccaaatcataggtcatttttacggaattaagagacggacgcaagatcgggtcgtcgaccgggttttcaattttttccccaaacatataaacctgaaggttcagcttcctcatactttctacatactgttctcctgtcattaaagccataatgattcttcctttcctgataagtaatgtgttagtgtttgattgaaggcggtgacctgtgcgcggagcgtgcaggttatcgtttctgccaatattaaaagcaattatcgtgccagaaaaatacatagtaaatcaaatttagaaaaaaggcaggccagtcgtaacagttcccttaagacgtaacagtttggacggcaggaacagttcccataagacagcttacggcggctgaaccgttgttgcaagaatgcaacaacagaccttctgtttcatttttgcaacaccaaatttgcaacaaaggattagggacagaacgctgaaaccgtaaaagggaggaatttagttacagctcatgctgtctgaactgttacgaaatttctggcatgataattgcttactataatattcgtatccggttcatatcaggacgaagaaaacaggaggcagttgatatggcagaaatgattgaaagaatagagaaagtgcttgaacaggatgtccgtccatccctgctgtcccacgagggcaacgttcagattgtatcatatgaggaaaaaagtaagatactgcgggtccggctgacggggcaatgttccggatgtccttcggcacagcttacaacggaagcggtaattgaaaaggcggtgaaggaaaagatccccgaagtggagcaggtgctgctggtacatgaagtgagcagcgagcttctcgatatggcgagaaaaatcctgagccgcagcgggggcagtgatgacagggctgccggaaaaaagagtgccggacgggacggcgcaccgttcatacggtgacaggaggcagtatggtgatcggtataaagtattgcggcggctgtaatccgggatacgtgagagaggagcttgtaaaaaagctgaaagagcgttttccgcatcatatctatgtgactgcgtctgagcagacagagtgcgatatctggctgctggtttgcggctgttcctcggcctgtgtttcaggcgaaggtctgagcgccctgaaaaaacggttcgtgctgacaagcatgaaggagttttcgaaggcggaggattacctgaagacagagagcgggcagcagatgaaacaggggaaagaaaaagagaaagcagaaacggccgaagcaggaacggtcagatatcttaggattggtgaacgtgcatcggctgtaaagacattttacaaagacgatgcggacaaatttgcgctgctgacgggggataataaccgccttcatacggatcgggagttttccgaacggcagtggtttggacggccggtagttcatggcgtcctgacggccagcctgctgtccacggtgatgggaacgaagatgccgggaaacggtacaatcctgatgagtgaaaatctggagtttgtgaatccggtatattttggggatacggttgaagccgtagtgacttttgtctcctgccgggagacaaagttattttatgtcggagaattttacggagagtgcagaaaccagagaggagagacggttgtaaccggaacggtaaggcagatgatgatgaaatcgctcttttgtttaaccggcggtacaaaacaggaggaataaaaaatgacgaatctagaaaaatacaataaaattttcatgggtgtattcagaaaaaaagaggaggaactaaaggaattaaaatacagaggttttgatctctgggattcaatcggccatatggatctggtagcggagctggaggaagcttttgaaatcaggctggacacttcggatatgctgaatctgacatcatacgaaaaaggcaaagaggtactctccggatacggcgttttgtttgaggacggccgggaaacgggaagcgtatgaaatatcaggcaatactcggcatgcctccttttggggtgccacagtctgaaaaagagcggctgcttttaccgtatctcagtcttctgacggagaaacacagggaatgctgtccggaatacggccgggttttaaaaatattaggctacagccgggagaaggcaggaaaaatcgaaaagctggaacagattccgatgatccctgtttcccttttcaaaggaggaggtcttaaaagcgttccggctctggagatattcaagacagtccaatcctcgggtacaacaggacagatgcgttccgagattgtcctggacaaaaatacggcggcggatcagcagaaaacactttccgcggttgccggcgattttatcggcagggggcggtttccgcttcttattgtcgattcccctgaagtcctgaagaacagggagcttttttccgccaggggagcagggattttaggattttctattttcggcaccgagcgtttctacgctttaaacagtgatatgagcctgaatctggacggaatacaggaatttcttgagcgccatcggggagaaccggttcttcttttcggttttacctttatgatatggaagtatttttaccaggctttgtatcggggaaaaatgaggctcgagattgaaaatggctgcctgatccatggggaggctggaaaaaactaaaaaatgaagctgtgacggaacaggaatttaaggaagcgttaaaacggcagactggaatcggcagagtacataattattacggtatggcggaacagaccggcagcatctatatggaatgtgaatgcgggcatctgcatgccgccagctattcggaggtaatcatgcgcagaagcctggatttttcagtctgtgatatcggggaaaaggggttattacaggtgatttccccggctgcccagtcttatccggggcattccctgctgacggaggatgagggaattatccttgggattgacgattgtccctgtaagagaaaaggaaaatactttaaagtgaccggacggacagccggagcagaaatcagggggtgcagcgatacatatgaaaattgacggcaaaagcgggacgcggacggaaattccattttccgaaccggtgatggattttctttccgctctttcagagcggattaaaagcgatgacttactcagaagtgatgaggaaatacgtgcttttggattctggtgccgcagggcaaatcttgaacggtacaggaaacagtatacagggaatgacttccggctggggagaggtcttgtctttcacatcgctccgtctaatattccggcgatgttcgcctggtccatggcgattggcctgctggccggtaattccaacatcatccgtatttcatccagaacagccggacagggaatgcgtctgaaagaactgatcggtcagatgctttcggaagaaaagaaaagcagcttggccgggctttcccaggggggaatttatgacatggtccgctttgtatcctacggcagcagcagccgggaacagacggcgtattattcctctctctgcgatgtgagggtgatctggggcggtgacaggactgtggacgaggtgcggcagattccgcttcgcgcggatgcttatgatatcatctttccggaccgcagttccctgcttcttctcaacacggaccgggtatcggaattggaagaggacgaactgcaggctctggcacaccgtttttatatggatacttacagtgtggatcaaaacgcctgctccagcccgtcctccgtgatctggcatgatgagggcggacaatgggcggaaaaggaaggagtcagaaagcgctggtgggcagccgtggaacaggcagccgcagcataccaacttacaccgtccagggcataccggaagtttcaggcgctctgtgaagccgctcttaatgatacttcgctctgcgaagcggtccggtacggcaaccggctctgggtggtgccggtacaaaagacaaaggagctggcaaaacggaagggcagctttggaaccttttatgaatacgggataaaagaactggaggaattaataccggccgtaaataaaaagattcagactatgacctgctatgggtacgacatacaaaaactgcggcgctttgtgagagattcaaggcttaggggcatagaccggattgtccctctggggcaggccatgacctttgaaccgacatgggacggaatggatctgatcgaacggctgtcaagagaaatatcgtagttacatttcgtaaggagatgagaagatgctcggcacattttatgaagaaaggccggaactaaaagaaaggacaatgctcctggacgataggggagccattgccacatacggggatctcgatgagttcagccgaaggacggcggggaggatgaaaagccggagcctcctgtttattttatgcgggaacagcatcggctcagtttttacctgttttgcggccctgagaaaccgcgttgtgcccctgcttctgaaccgccaaatcatggaggacaaggccaggagggagatgctcggtgagctgatggaagaatacaggcccaaatacctggcgctgccggaagaagtatatagcgccaatccggattatttcgccggcatgccgcccgtctggcacgaatggggctatatctgcctgagctgccggccgtgttcggagagcagccgggaggtaaagctttatgaagagctggccctcctgctgacgacatcgggaagcaccggaagtccgaagcttgtcaggctcagctataaaaacctgagttcgaatgcggcttccatcgccagctatctggaacttacccggtcggaacgccccgtcacaacgcttccgatgaattatacatacggcctgtccgtcatcaacagccatgcgctggcgggggccgccgtgcttttaacggaaaagacagtgtttgaccgggaattctgggagtttgcgtcggcagaaaaggccacttcccttgcaggtgttccctatacatatgagatgcttaaaaaattaaagtttatggagatggaactgccgaatctgaaaacaatgacacaggcgggaggaaagctttccgtatcccttcaccgtgaatttgccgaatatgcagccggacatgggaaacgttttattgtcatgtacgggcagacggaggccactgcaaggatgggctaccttccggccggcgaagctctgaaccggtgcgggagtatgggaatcgcaatccccggagggaaattccgcctgacaggggaggacggcagagagataaaagaggcgggaacgaccggcgaacttgtctatgaaggaaagaatgttatgctgggctatgcaaaaaaccggagcgacttgtcaaagggagatgaatgcagagggatccttttcaccggagacatggcaagacgtgatgaggcgggtttttattatatagaagggaggaaaaaaaggtttctcaagctgttcgggaaccggatcagcctggacggaaccgagcgccttttgaaacatcattttgggggctgtgattttgcctgtaccggcaatgatgaagggatgaaaattttcatggctatgccgaaggagagtatgggttcgccggggcattgtgcattgccaaagccggaggagacggcgctctttctggagaaggcgacaaagctgagccgccgtgtatttgaggttatcacagtcggggaaataccgaaaaatgatgccggaaaagtgctttataaaaagctggaagaactcccgtaaatcatgtatgatgaatacataataatgggaaaggatttgaaggaatgaattacgaagaacagctgaaacagacgaatgagacaaatcactttatgattcacaacaatattaaagctgcaatgcttacaaaggatcaggcccgtgtcaccgcagccgtcacccccgtctctctgaatgcgatggagagcgttcacggaggccttatgttcattatggcggagatagccgccggcctgctgacgagaaacgacggccgccgccatgttacggtgaacagttccttccggttcctgaaggggacgaaccgggctgaggaactgactgcggaggcggccgtgataaacaggggcaggagactctgcgtctgccgttccgttgttagggagacgggcaatgagagaatactggcggagggggaatttacattttactgtttggacgagggataggtactgtctgaagacagcttttccaccgctctttttaacctcccgcacccctccacaatattttcatagctgtttgcgaaggacatgcgaagataaccttcgccctccggaccaaagacatcaccggggacaaatgcgagctttgcctcatttaacagatattctgccacctcagcggacggccttcccagcttttttatgttgataaagatataaaaggcacctttggggcagaggcagcttatgcccttaatccggttaatggcacccacggcataatcgcggcgtctctgatattcgcggaccatcccgtttacttcatctttttcatcgcgaagggcggcgacagcggcctgctggacgaaagaagtggcacaggtcgtattgtgctggtggattttattaaggacagcaatcaggctttccggcgcggcggcgtaacccagcctccagcccgtcatggaatatgcttttgagaaaccgttgagcgtgacggtgcgttccttcatgcctggtaaggatgcaatgcttatatgcttttcaccgtcataaatcagcctctcatatacttcgtcggcaagcaccagaatatcattctccacagcgagccgggcaagctctgtcagtacgctttcagagaggaccccgccggtggggttgttcggggtgataataaccatggcctttgtcttatccgtaatgctgttctttatctcatccagatcgatttggtaatcgttttcttcgcggagatggtaggatacgggaacagcccctaaaagcttcggcacattcatgtagttgatccatacgggatccgggacaaggatttcatccccctcatccaggatgctgcacagcacatcgtaaacagcctcggtcagtccgacactgacaatgatctcagatgccttacagtcgattttgttctgggttctcagcttattggcaatggcctcccggagcggcaggataccgaaattggaggtatagaagacatcccccgcagtgatgctgtcgatacaggccttcttaatgtactccggcgtgtcgaaatcagggcgtccgatttcaaaatggaggaccggttctccggcccgttccatctcaagggccttttcattcattttacgtatgcctgaaggggccagccgttccatgcgttttgcaatcatttcattcatattcataattaaaactcctttcccgtctgccggtttttgataaatccggtttttttgtcctgcctctattatatcggctgtactccacaaaaatccaatagataaaagtatatgcaggcataagcaaatgagtataaaaacggaccgtataagaaaatatttatacttctatacaaattaaggtcttagacagaatcaggactcagatgttatcgtaggggtaaaggaggaaatgctatgagacttgcaaccattaaaaacggcggcacagagacggccgcaatcgttacgcaaaagggagtatgtcccatccgtgcggttaacaaagcaaaaggaacatcatggaaaacaaagatgtttgatttaatcctgaaggaggaaattcccctgctgaccgcgtggtataacaatggggggaaagaagagctggaggagatgcccggcgtgattttggcagaagaagccgtatatagtccgctctacagaacacctcagcgcatcttcggcatcggattaaactatgtggatcacgcaggggatttgggggagagcgccccggttggatttcccggaagcttctataaaccggcatcctgtattatagggccgatggatgagatacggattccggagttggaggaggcaaagaagacaaccgccgaggctgagcttggaataatcctcggaaaggactgcaagtgtattgatgaggaggactgggaaaaatacattgcgggctatacggctattctggatatgacggaagaatctatcctccgccagaacccgcgttttctcactattgcaaaaggtttcgacacttttttcagcttcggtccccagctcgtcacgccggacgaggttccggacgtgctgaagctgaatgttcagacggtacataacggcagggttcatgccgggaatgatgtaagtaatatgacacacaaaccggcccgtctcgtctccctggtttcacggctgcagggatggaaggcgggagatattctatcaaccggaacaccgagggctgtttatatcgaggacggcgatacggcggaatgccgcatcagcgggcctgacggttttatgatggaaccgcttataaatcctgttgtggatatgaagaaaaggagggggtaatatggaactgggattaaaagataagacggcgattgtcagcgcgtccagttcagggcttggaaaggcaattgccatggagctgtgcagagagggcgcccgggttatgctgttttccccgtttgaggaacagcttaaggaggcgcaggccgaaatcgaagaaaagacaggtaacaggccggaatatgaggccggagatatcacaaaggcggaggatattaaaaggctggtgaagaccacgactgaaaaacttggcccggtttatgccttgatgaataacacgggaggcccgtcgccgggaacattcgatcaattttgcgatgaggactggcagaaagcgtttgagctatgcctcctgtcctacatccgcctgatacgggagtgcctgccgattatgcgggccggcggaggcggaagaatcctgaactccacctcctcctctgtgaaagcggtgcttgacaacctgatcctctccaataccttccgcatggggggagtgggactgtcgaaaaccctctcccaggagctgggcaaagatgggattctggtaaatgtcatagggccgggaagaatcggcacagccaggattgatcagatggatcaggtccgcgcagagaaggcgggtaaaacagtggaggagatacggcagtcggcatttgcgggtatcccgctgggccgctatgggaagccggaagagtacggcaaactggctgcctttttgctggcgccttccaacacttatattacgggacagaccgttctggtggatggtgggatggttaaggcgttctgacgcttatccctccgggtgaagcatcatatatttgatgaaatcgtctgacagcggtgacggtgcaggatgctttttataagagatcaggatttcacgggaggccatctcgtcccccaatttataataggccagtttatcacttgcttcagtggctttaagcagagtatttctgaaaaaagtgataccctggccgttttttgctatattgtaagcagtcagcatctgatccagatacaggcaggcatttggctcaaagcctgcccggcggcagagctccatagccctcctgtacagatcatgctgctttttcagcagcaggaaaggctcttccttcaggagcgaaagatcgacggcgggaatctcttcactgaggaaactgagatccttaatctgggagccggtgaggcggtaagcggccaggcgctcatttacatcaaaatgggaaggcacggccaggaggatatattcccgtccgagaggaatggattcaaatacctggctgtccatggtctccacatccataaccagatcaagctcccccgattttagcttttcttccatgtccgtgacaacggtttctatcaggttgagcgtacagccgggattgtgttcgtgatatcgttttataatgccgggaaggacgtaggtgcagaagtaggaggagcttccgatattaagcgtgcctcccctgactccggcggcagaggcaaagtatgcatcaatccgatcctcgatttcagaaatttccaggccggcttttatgtagaattcgcccgcaggggtgagagtaaccgggttaacgccgcggttaaaaagcggtacgccgtaaagctctgtctcgacttttttgatagcggcgctcaaagccggctgcgagatatagagttttgcggccgcctttgaaaagctgccctcctggaagacggtatagatatattcgaagctgcggtttttcatgatttaatcctcctgcttgtcaacggaacctgacattattataatttgccgggagataaaatgcaatcaggtatgtcaggatccgcctttgaccgcctttctgcctctgccagggacttgccctgccgtatcatttccgtctggataatcgtttctgctgccgtaaatccgtgatataattataaaaggataaaaggtgttaccggaacagccataaaaggaaattttatagagttttttcgtctgacgcaggatgacggaaagaagacgggagggaaaagtgttagaaataaggacggcaaaagaggaagagtttgagaacgtagtgtcattttatgacgcggtgattgatgggatgcagaatgccgaatcaaagccgggctggaaaaagggaatctatccggatgagaaatttttaaagggagccattgaacggcaggaactgctgatcggcattttggacggtgtgattaccggagcaatggtggctaatcatgagtgtgccgatgggtatgagacgatagaatggaaaaccggtgcaggtccacaagaggtaactgtcatccatgcgctcggagtcctgccggaacaccagggaaaagggctggccggagagatggtaaatgaggtgataagacgggcctgcattggcaggcagaaggcgatccgcctggatgtgcttgcggctaacgtatcggcccaaaggttctatttgtccaggggatttgagtactgcggcaccgtaaaattattttatgaggatacgggattgacggaatttctgctgtatgaatacatactgtgattcaatagcttttattaccctgtcaccgctttctccggcccggctgctcccataccaggatgataagacagccggcggcgtaacacaggatatctttgacatcaaaggtggaaccgagaatgatcattgcagcccggttatgctccagcccaagcagcctgccgatatggaaatattgaagaatttcaacgctgacggcaaagagcagcacataccagacaaggtttttaaccccgtgaggaaacagagctctgagaaaggtatagattaaaatgacaacgaggacatccccggcataggggcgtataaaacgatcatgcacaaaaatcccgatgaacagctcggtgagcagaaggaagaggaacatggtgagatagcggattcggggatttgtgatttttatatgcttcatggcaaaatccttcctggtttgcaatatggctcatagtgttactattcacagctgctattttgcggggctgtgaatagtaacatcatagcggctgaatatgctttaatgtgtcattgtcaatctctcttttcatttctttaagaagcggattagtttcaaaatactgcttcccgtaagaaagattgaattcatagtcgaaatcgtctggattttggccctgattatgctgaataatggtttccgccttatccagtgccttgactaattttgcttctgccgttctgccgtcttcatattcctgccagagggaagcgatgcggctgcgggccggttcctccagaagggataacagtctgctgaccgatccggcctctgatttgtacttctcatccggatccggcagcagggcggcagaaatatcgccgtcatagatttcgcccagatcatggaccagagccatcatcagaagctttttcccatccagttccggaaattcttgcgagatgattccggtaaataaagccagacgccaggaatgctcggcagtgctttccttctttcctgcggaagtccaggcagtgcgggtgatattttttaacaattctagttcttttataaattcaaggtatgattgaagtagtgtcatgaaagtaacctcctgattctttatttatcagtgtagaagattacaggagacttgtcaatttgttttacagcctgcgggttttgctgtatatattttctatttgactttcgtatcttagtatgatatattacgataaaataaaaatgatcgtgaggtgtgtgtttgttaagtgtgttaattgcagaaaaggcagcaaaatagttgcataaagagtagggttttctggctgttacgccaggagtctgcccttttatcggcgtgtctgtggccgatagaacctgcttttaccacttcatacacaaacctgaggtttaatttggaggggagcggtgcgctccttttttattttcatatggaagttgtcctgtgatataaaaatgctccgcgaggagctccggtcctgggaataagtctgtgaacgtgggggagatacggtcatggacttattttatttaacaggaaagctctcctgttaaataaaaaccgcttcgcggaggatcgcactgcggcggtagggaattatgtcgccgaagcgacccgccgcaggcggataatcccgcgagggggattttatcttataggaggaaaacaaattgaaccgaacatttgaaacattagaatttaatcatattttaaaacagttggaagagtacgcttatacagagagaagtaaggagaagatcagggctttggagccgtatctgagggaaacggacgtaaaggttgctctgcgcgagacgacagaggccagggaaatgctggacaaattcgggaatcccccgttagtgacgcttgatcaggtggaagaactgctgaatacggctcagaaggaaggatgtctgactgctgaacagcttgagtatatcggaataacgctgacggcggtagagaggctgaaagactatctgtcaaggggaaaacatctggagtccggccttccgttttatgaggcggacctctatccgatgacggatataaaagaagagctggcggcatcagtcaggaataaccaggttcaggattacgccagcaaatatttaaaggataccagggaacagattgccaggacggaagaaaagatgcggacaaaggcagaagccgtactgaaagcgaataaagatgctgtatccgaacaattcattacttccaggaacggtcgcatctgcattcctgtaaaaaaagattataaattcagaataccgggaaccgtaattgataaatcgtctacaggagccacactgtttgtcgaaccggtgtcagtggcgaaatacggcgaggagcttcagcttttaaagctggacgaagaaaatgaagtcaggcgcattttatatacgctgacagcgctgatagcggagcagcaggaactgttttatgaaaatatcagggtgatagaaaaactggactttatctttgccaagggaaagctgagcgctgctgtctgcggcacgctgccgaagataaacctggagcgcagaatacggatcaggaatggccgtcatccgcttttagatcccacaacctgtgtacctctggatttcgagattggccaaaagacaagaggaattattataacggggccaaacacgggaggcaagacggtagcgatcaagacagtgggactctactgcctgatggcccagtgcggtctgcatctaccctgcggggaagctgatatctgtatgaacagccaggtactttgtgacattggggacggtcagaatatgactgagaacctgtccaccttttccgcccatattacgaacgctctggatattctgagacgggtgaaccgggagagcctggttgtaatggatgagctgggatcgggaaccgatccggccgagggaatgggaatcgcgattgccattttagaggagcttagaaagagcgggtgcctgtatcttgttaccacccactatccggaagtgaagcagtacggggagaatgcggagggagtctgcaacgcgagaatggcctttgacagagaaacgctgaagccaaaataccggttggagataggccgggccggtgagagctgcgctttctatattgccaagagtctcggtatgcctgcggatatgctccgcagagccagccaggctgcatatggggagaacgacagtccggatatcatggacgcccttccggaacagcttgaacgccggtctgcgccggtcatacaaaaagaaaaaatccataagaatcatcagacggaggcagacgcattccggctgggagactgtgttatggtttatcccgacaaaaagacgggaattgtctgccgtaccgcaaatgaaaagggcgtgcttcaggttcagatgcaggataagaaaatatggattaaccacaaaaggataaaacttcacgtcccagcatccgaactgtatccggaggattatgatttttccattatcttcgaaagcgtggaggagaggaaagcgaaacaccagatggagcgtaaatactgtgaaggaatggagagaactataccatccacagactgattgtggtatactatgagcacttgatgaggtattacacgaatctagtgcgagtcatacctgaacccttggtgaggtactccacgaacctagagttcatggtatactatgagcatgagcacttgatacattaaaatcacccggtcagcggccggacagaaacaggagggatagcagatgacacagcaggagctagtcctgtcggcggaattctttctgcgcattctcacagcggcagtctgtggaattgtaatcggatatgagagggaaaacagaaataaagaggcggggatccgtactcatgcaattgttgctttgggcgctgccctgatcatgattgtgtcaaaatatggattttctgatattcagaactatgatgcttccagggttgctgcgcagatcgtcagcggcatcggattcctcggcgccggaatcatattcatcaggaaccgcgctgtgagcggccttacgacggcggccggtatctgggccacggcaggggtgggaatggcggtgggttccggtatgtactatattggtattgccgttactgttctcattgtcttgatgcagttcgttctgcacaggcagtttgtgattaaaaaagaacacaggtatgaaaaactggtcattatcatgaaagaccatccgggaattgaagagcttcaggaaaaactgctcggacagaaggtggaagtagacagtctggagcttgagatgacggaaaaccaggagtacagaatggagctgggagtttttctgccgaaagagtacaacaagatggaactgaccaaaatactgatggactgtagcggcgtcacatatgtcagatgctgaccccgcaggccgcggctgatgaagccggtaaaagaataaaagtataaaagaatccccttccgtttttttcctgatggcagcctgtcagcgggaaaataacagaaggggattttgtaaatcaggatttcggtttaaatcagaatttatgaaataccggagaactggtttcttaccttctgaattttcattgcctccgcctgctctgtcgtataccagcctttggcagacatttttttgtaaatgtcatcctgcatgcaaagactgttgtttaaggcctgatcaaagctctgacgcacatcctgggtcgaagattcaatcgtaccatgaagatacagatcacatacgcctttggtggtcagaagcaggttttccattatacatctgtcatccatttttgtaaccctcctttcatcattaggttaaacgatagaaactgtcaaaaatctgctgatgcttgtcagcgatctgctgaacacaggttttcagttcctgatcctgaagattttggattgcatcctgacactgagttttaaaaaatttctcatgtcccagagcatcctcgatataatctaattcctttggactcataattatcacctccacatttagtatgtgaagattacaggaaagtatcatcacattttccttccaaatttattccaatatattgaaacgttttttgtgcgaacagcagcgaatgtaaaaaatcgtaagatacgtaaagataaattctcttgtggcagatgtttctggaagatataatggaaaataatgagagaaagcagggtgaaatattatgattacaataaagaatgatatcaaagagaagaaaaaacaacgcaaaaaatatttaacgccatgtgcggcagtgctgctgatatgttccctggcggcctgcgcaggaggcggggcacagaagaatgcaggaggcggggccggggcggcaagggctgcggagacagaggcaggaacagaggaaaatgtaagtaagcaagaagcagcatctttaactggtgaagagacggccaattcggcggaatccgcaaaagaggagacgcagacgccggtgacagagagccgggcgcaggactggtccgccctccctaatccaattgtggatgtcggttcttcggaagactttgaagcggcaggactgagactttggcttccggccaataaagaatggtatagtgatcctgactacagtatgataggtgataaggctgcgcagattcaattttacgatgagattactaaatcagatgccatcgcgagggcagccaaatcggaggaaggtgatatttcgggtatttactatgtgtttgatgacagcaggaaacagagctggttcacaaaactggaggatggaacgaaggtggacatcacggtccgggtcacctcagaaaattcagatgtccatggagtccttgccacatggtcggccggtgataccagctacagtctttgggaggatgatgcctgggaacatccggatgccgtggcgaaaatggcgattgaaattataaagatgagcgatccgggaagagagacagagcaggattaaagaccgccctgttttaattgacgggggtgatgtatgcgcggagcgggcccgccgtttccagcgggccgtgtccggtttacagtaaattgtccgccagcttcatccgttccaccacgggaacgtggaatggacagcggctttcacagcccctgcactcagtacagtcggcggcgttggcgctgagctgacggtaatgggcgcgcacggcggcgggtacctcccggtgcatggaggccaggtcataaagcttattcaccatggcgatgtcgattccggcgggacagggagcgcagtggccgcagtaggtgcactggcctgaggaataagcatgatgcggcgcccgggccaggacggtggcatagtccttttcttctgcggaggcgttctcataggcaacggccatgaggacatgctccggcgtatcatatccggccatcacactggcgacagcgggccgtgtaagcgcataatgaaggcactggacaggcgtgagtgccacgccgaagggggaggtgcgggcatcgaataaacgtccgccggcataccccttcatgacggtaatcccaacttcaaggtgttcgcagatgcggtaaagctcctccctttccggcgcaatgccgcccagtgcttcatcgtattcatcggcaaaatactggttgatgtcttcggttgggggaagcagatcaaaagcaggattgatgctgaacagaatcatctcaatctcaccgctcagggccaccatctttgccacagccggattgtgggtgctgaggccgatatggcggattaccccgtctttcttaagtcctctgacatagtctatgtattcccctgacataatccgctcaaactctgcggcctcatccacgaaatggatcatgcccaggtcgatatagtctgtgccgagtctggcaagtaaatcttcaaaggcggctttcaccagaggcatacagcgggtgcgcacgtactgtcctttctgccaggtggaaccgatatgtccctgtataatccatctctcccggcgtcctttcagagccgctccgatattggagcgtacattaggttcggacatccagcagtccagaatattgattccctgcgcctcgcaggtgtcgatcacttcttttatttcccgggagtcatggcgctccagccactctgccccaaggccgatctcacttacttccaatcctgtttttccaagctttctgtatcgcatacaaatctcctttatccggtgcaagtctcagacacgctaaagggcgcaaaagaccttttgaccccaacatcatattataattaaagtataaaagggaaacgccgttttgccaaggggaatcggcaaaacggcatctggttaatcaatcccggtgcattgtctgtacaatgaccggatgttttgcggcggctttcattgacttgtgaggcagggtgcctccatgccgcctgtataccggaataataaacagaaaaagggcgatggaaagaatgaaaaacaggatataggacggaagatagcttccggtcctgtctgccagcattcccggtacggcgctggagaccagtccgcccagcgcataggagagctggtaatttttcagtactgtggcgtaatttcccacctggcagaaatcggaggccataatggaaagacccacagaggccagcgcaagccccataccgagaaaaagaaaggtgattccgaacagaaggcggccggactgaggcgcgaaacagcagagcagctggccgatacaaagaaacaggcaaaataacgccgctgtacgaaagctgcctgcccggtcggcaatccagccaaaggaacatttaccggctatgagcagtatgcccatcagcgacaggaaaaaggaaacagtagcggctgaatggccggcgctggtataaagcagggataaataattaaaaccggtcagtccaagcactccaatcagaaaagagccgcacaggatacggagctgttccctccggctgagccggttgtggagcagtgtgccgccgtgaatgcagtccctggagctgccggaagaaacttctgtttccgggaaatcttccacacctgctgtttcgatccctgtatgttcaggcgtgttttctctgatcagtgccacaatgggaagcgttacggccgcaacagccagagcttgcgccaggaacgcggaggaaagtccgaaattctcaatcagaaacagcagcgtcacgggacccagaacagagccgattccgctgccggaggcagcgattccaagcgccgcggcaggtttcagagggaaccactgccggatgagcagagaggcgggaatcataccgcccatcgcatagcttatgccggacagagccgatgcggcgcagtaaaggagtggtgtggatgatatgccgtagataaaaaatgagagcgaggcagacagcattgccagtgcgattccttttttcaggccgagccgtccgtaatagcggtcggcggcgaacattgccaaaagggaggttacacttttcatcgtggcgagcagggaaatctgggtattggaaaaaccgtggacttttataataaaaggcaggcagatggaaaatgcattgctgacaagcccgacacagacaaaaaccatgacggtgctgagcgtgcatatggtaaagcggtagggttgagctttcatggatattcctcctgctgccgtttgacggcataattgttattgattacggtgatctttgcgcggagcgtgcaggttatcgtttcatccgcctgccattactgccattatcatattagagaaatatatatttgtaaaatgaattatacaggtatataatatagacaaaatcgatatttatcatcgcggaggaagtatgaatcaggctgaagtggatgcatttcttgcaattgttgagtcaggctccctgaccagggccgcacagaagctgtatctgacacagtccacactgagcagccgtctcgactgcctggagaaagaactcggcgcgcctcttctaatcaggaaaaaaggaatccgcagggtggagctgaccgaggcgggaaagaagatggttcccgtggcaaagaagtggaaaaaactgtggcaggagacaaaggagattatctggaaggaagaccggcagaccatgttcctgtcaacgatacagagtgtccagacttatcttatggggcctgtatacagggaattcctggacagggcggataactgcgacatgtgtattctggccctggattcgggtgatacatacaagttaatagaatcgggagaactggaagccggactgattgccaatcccggttattcaaggacggtggcctcgattcccctgtttcaggaaccgatgtgttttgtatgcggggcaggcagctcctacagcggtccggttcatcccgcatccctgtcggtcagaaatgaaatctatctggagtggcatcctgagtttgtcctgtggcacacctactggttcggagacgggagacggtgcagggtggagacggacaatatgcagctattagagcagctaatcgaacaggatgaatactggagcgtactgccgaaatcggccgctctcagcatggagggcaggatggatgtcagaatccttccgattgaggatggccctgaagacagagtggtgtatctcctgctgaagcataaagaagactgtccgccgtctgttcggatcctgcttcagatgcttaaggaatatctggagaagttgggaatcctttggattggggaagggaaaatctgatacggagtaatgaggtgcatatggaaatgaatacggaacgaaaaagaatattgtttgccgacgatgatccggagattcgggaggtggtccgtattcttctggagcatgaaggctttgaggttatcgaggcctccaatggaaaagaggcggtggaaaagtccggcggctctgtggatctgattatcctggatgtgatgatgccggggaagtcagggattctggcctgtctggagataaggaaaaaactgacggtacccatcctgtttcttacggcccgcacccaggattccgataaggcgctgggattttgcgcagggggagatgattacctggcaaaaccattttcctatacggagctggttgcgagagtcaaggcaatgctgcgcagatattacgtctatcagggaggcggaaaccggaaagaagatgacgcacagatacaaatccgggatctgcttcttaataaggacagccgtgaggtgcgtctggagggaggagaaattcttcttactgatttggaataccggattctccttcttctcgcggagaacaggggaagatttttacgatacagaatatctatgagagcgtttgggaagaaccgtattattacatttccaataacacggtgatggtacatatcaggaatctcagaaaaaaactggagaaagatccgaaaaatccgaaatatatcgtcaatgtatggggaaaggggtaccggatagagtgatgaaaaaacttcgcagcagattatggattaagctgattctgtcagccgtctttgccgccgcctgcgccgcctttgtctatgtgtgggcactggagctgtcctaccgccttttggatcagatttatattaatccggccgttatcttaaagcgggaagagcagtatataaaggattttcaaagctatgtgacagaacagaagctttccatgaatgacagaaagaagataaaagagttcaccaaaacggattggacgattgtcatggcgctgtaccaggagaatgatataatcttcagcagtgacagccgctttattgtgcctcttccggcggacgaatacggggagacgataaaagacacatctgaggcgtcgggagtttttaatgtgacgttcacggacggcgcagtacaggcagcactggtttatacgggatatgagaattaccagtccgccggagtgattgtgacgcttttgagcggcctttgttttgccgtaattttatatcttctgattcgaaaaaaagtaaaatatattgaattgctggggaaagaactggagattttaaaaggtggagatttaaattaccagattacgataaggggaaatgatgaactggcggctctggcgggagagatggattccatgcgccgggccatccgctccagacaggaggaggaagagctggcccacctggcgaaccggggcatagtgacggccatgtcgcacgacctgagaacgccgctgacggctcttatgggttatcttgatattctatccatagaggaggaccccggcaaaaaacagaagtatctgtcggtctgccgtgacaaggcgtgccagataaagagcctgtcggataagctttttgagtattttctggtatacagcagtgaccaggatgaactgcacgcggacgaggtgaacggtgcggaatttgtgggacagatagttgaggagagcctgtttgacctggaaaatgaggggattgaggtggcgcgccgggccggagaaattacatgcaggctattggtggatgtggatctgatgcgccgggtttttggaaatcttttttccaatatcctgaaatatgcggatcggagccatgccgttcaggcggaatacggagagacaaaggatgaactggtcatccgcctgcgaaacagcgtggctgcggatgcatcggagcgggagagcagcaatatcggcctgaagacatgcgaaacgatactgaagcgtcacggaggcactttttcatatcaaaaagacgccggtatgtttgaggccgaggtcaggattccgtgcatcagggaataagcatcggatagggaaaaacattgggcagggataatctttaaatcaggaatagattcaggagaatgagatgaagatacaggaattaaaattatttaacggattgacggaggacgagcttcagcggagcctggtctgttcacagtcaaacatcgtggagtatgaaaaagatgattatatcttttctcagggggagaggcccaggtggatctacatgattctgtcaggggaggttctgctggaacagattaatatggcgggacgccagacttatgcggaatatctgggtgaaaggcagcagtttggcgttgtggacctgtttcttaagcggaaacagtattcctactcggccagagccaggagccatgtgaagctgcttaagatatcaagccattttttctatggaacgtgtgaaaataactgcatgcaccacagcaaaattctttttaacatgatgggggtgtttgccgaggaggcggagaaaaaatcaaaaaagatacagcttttgacctgcggcagcttaagacagaggatagccctttatcttctccagaacagcggtgaaaataaaaaggttgaactgatgatgaaccgggaggagctggcggccagcctgaatgcggccaggccttctctgtccagggaattatctcagatgcaggatgaggggattattaaaatggagggtcgcaaatccatcaaaatccttgattattcccggcttcaggaagacctggccgatgtttcagattaaattatcagtcttcgggaacaaaaacgtcttttccaagaccgcatatcggacataaccagtcttctggcaagtcctcgaatgcagttcccggagcaattccattgtccggatcgccaacctccgggtcatactcatagccgcatggttcacagatatattttttcatttctaattacctccgtaatctgtttaataatacgtttgaattactcagccttccaaaggccgtgaagattgcagtactcgtaggcagcgataaattcatcgccgtcgccaagaagaaaaacggcttttggttcttcgccgggtttcagggaagcaaactgtccgccggcttttgtttcaatataaatgcccgtaatatagtgttcctccagcatgggatgagatacggaacctaccgatacttccactctgtttccgtcaattgagacaacgggtacatgcttctcagccgcgccgtccgaggtgttggccttcagggactcaagtccgacttccttttcaccgtctaaagccaccagatttaataagatatttttcttgtcgtcacttctgtaaaatttattcatagcagacctcctgtttgttttttgatttgttatttgttctgtagataagataccataaaaaatgaatgaagtccgtaacaaatgttacgaaaacaaaaaaactgtaagaaaatggaagtctggaatattcaggctggatttctgtacgcattctgctataattagtaggacatggccccaataagggaatggctacaactaaaggagaatgaacatgagacagaaaacactatcaatcgaacaaatcgtattatgcggcatgtttgccgcactcgttgccaccggcgcatttataaaaataagtatccccgtacagccttttcctatgcattttaccctgcagttcttttttgttctgctggctgcttttgtactgggcgggaaattgggaagtgccagcgtccttgcgtatctcgtaattgggctagtgggggttcccgtctttgcggcaggaggcggaccggcctatctggtgcgcccgaccttcggctttctgctggggtttgcaggcgccgcctatacgacaggaacactttctgagcgcttacaccgccatacgtttctgaatcttctggcagcggcatttgccggtatgatggtcatgtatctgtccgggatgctttacttttattttatcagcaattacgtaatcagtatgcccgtaacgtggggaatcgtgcttgtaaattgtttcctgcttacggtgggaggtgatttcctcctctgcgtgctggcgtccgctctggcagtcaggctgcttccgatattacagaagatacggtaaaacttaaatttttatgacaatttcatttgttttgaaaaaacggtggaaattcggcttgtggtcgtgctatattataaacaggctgttaaacggccaaaacaaaaacagatagaggttgaaagaatgagaaaaagaaaggtcttaagaactctgggagcggtgtcggttctggcgctcgcattcagctttactactctggcagatgacgcgtcgcagtttgtgacggggacagatgtgaatggtattgtgataggaggacttacagaagcagaagcaaaggcgaaaatcgagcagtcctacgcttcgagctacaacctgacaattattgagaaagacggaaagaaagagaatattaacggtacggagattgggtacagggtaacggtccctgacaatctgaaagaaattctgagccagcagaataacacgggacgccagtcaggaccttcttccgataattcccatacactggagcttcaggcttcctatgacgaagcgcttctcacggcgagaatccgtggactggaatgtataaacggaggcagcatcatcacgacggcggatgcccgtatctctccttatcaggagggacagcccttcacgattataccggaagtgcagggcaataatgttgatgcggcaaagacggaagcggtaattaaggccgcagctgcctccggacagagccaggtgaatctggtggagaacggatgctactatacggtgcaggttacaaaggacaatgaacagttaaaggcgctctgcgataagatgaaccagagtaaagacatggtaatcacatataatttcggcgagaataaggaagagctcaccggcgccgtgttcaccagctggttcaccggttccgaggacggacagattcaggttgacagaaatgccgccgcagcctacattgctgcattggcggccaagtatgacacggccggaaccgccagggtttttcatacggcgacaggcaaggatgtgacactaacaggcccgtacggctggaaactcaatcaggcaacagaggttgaggcgttaatcgcgatgatccggatgggacagagccagacatgggaacctcagtataccgcctccgccgccagcaggacggctcctgactgggggaacacctatgtggagattgatctgggcggccagcatgtctatatgattaaggacggagcgatcgtttgggatgccccgtgcgtcacgggcaatgtgtcgaagaactatacgactccggaaggaatatacagcctcacctacaagcagacggacagaatcttaagaggcgccaagcaggcggacggcacttatgagtatgagagccatgtggattactggatgccgttcaacggtggaatcggtcttcatgatgcggactggagaagcaaattcggaggcacgatatatcagtacggcggaagccacggatgtatcaacctgccgccggcgaaggcgaaaattctgtatgatctggtctatacaggcattccggtcatctgttacaattaaacggaaacggtaaagagcggggagaccttacgctgctaacgataacctgtccgctctgcgtacaggtcaccgccatcaataaaaaagatgcgggattcacttcgaaatgaatcctgcatctttttttgaggcttgtgtgagcacgcagtgcggagcaatccaatatcaaagggggcaaaagacctttagatcccaacatcttaacaggatatttctcctgtagataaaaaccgctttgcgggggaacgcactgcggcggtagggaataatgccgctacagcgacccgccgcaggcggagaatcccgcttcttgggagtctttatcggtacagctaaagagtagagcatgttttaccggtttcggaacatgtcatttaactgttgtaaaagctcgacatcggaaggggacagctttaagttagtctcaagtgtccttccgtccgttgttttcaccgacagctctataatattgccttcggccaggccgttttgataaacggcattcaaaaacatcggaaatttcggatggttttttacaaatgtatcacaggaatttttaatcagcaaaagttccattgggttcatggcgcacctcctataataaattattatgtggcagcaaaagaaaaagaccgcagaatgaggcggtgattgaagaagctgccttcctattataataaacgcccagattcctgtcaattcggtcagaagggccggggaaacgtgactaaatcacagaatgccggtaatagacggtaatataatagcagcagacggtgaaatgcaggaaacggtgaaatgcaggaaacggcaccggacgaatgaaagagttgattcgtacaatatagagttaagttgaaaggcggatatgatgatggaaaataagaaaagacggacattgataatcgggggagtagcgggaggggccactgcggctgccagactcagaaggagggataatgacagggaaattattgtattcgaaaagggagaatacatttcctatgcaaactgtgggctgccctattatgttggaggcgttatcaaagacagaaacgcgctgcttctgatgaacccggagacaatgaaagcgcgttttgatattgatgttagaatatcaagtgaagtgactgcaatagacagagagaataagaaactggccgtttttgataaaaagtcgggggagacatatgaggaaccttacgatgaccttgtgatcgcaacaggctcttcccccgtggttcctccgatcccggggattgacggcgagggaattcatacactttggacggtgcctgatacggatcggataaagaggatagtggaggagagaaagcccgaaacggcagcggtcataggaggcggttttatcggcctggaaatggctgaaaatctgcagaaggctggcatcggcgtaagtgtaattgaaatgcagaatcaggtgatggcgccgctggattacgaactggcggaactgcttcatgaaaatatgacaatgaacggcgtggaactgattctggggacggagtcgtttcatttgtagcccgggatgacggctccaccctaattaacctggccggaggccggacaatcagggcagagatggtactgctctccattggggtaaagccgagcagcgctttggcccgtgctgcgggacttaaggtgaacgctcggggaggcattgtgacggatcggtttctgaagacttccgatgaaaacatttatgcggtaggagatgtcattgaggtcgagaattttgtcctgcaaacgcctgccatgataccgcttgcggggccggccaacagacaggccagaatctgcgccgacaatctggccggcgacaggaaagaataccatggaacaatgggaacctccgttgccaaggtatttgacaacacggcagctgttacgggagctaatgagaagaccctgagggcaatgggaatggtaaagaataaggattattattctgttctgatcagccagaaatcccatgcgggatattatcccggttcgacagtcctgcatatgaaaatgctgttcggcaaagacggcaggctgtttggcgcccaggctgtaggtccggacggggcggacaaacggatagacgtgatagcatcggttatgcgcagccacggaactatttatgatttagaggaactggagtccgcctatgcgccgcctttttcttcagccaaagatcctgtgaatatgcttggttttactgctgagaacattctcaccggattagtgtcattcatcagctgtgcagaacttgatgagctgtcgcccgcttcccggccggcgcaggatatgacgattctggatgtgagggaggagattgaattcctggaataccacatcccgggttccgtccacattcctctcggaaagcttcggggaagactggacgaacttgataaaaataaaatgacggccgttatctgttccgtcggaatcagggcttataatgcagcccgcattctgatgcagaacggttttggccaggtacgggttgtggagggaggaatcaatttttataagtcacagcactttagagattttgaaaaagagcttcatgttattccggcagaaataccgggatgccctcttgacatgggaaaaggaaggagttagaaaagaaaccattatttaccggtatatcttccaaaaattttatgatattatagttttgtaacagaaatgtaataattttgaaacaactaggaggatttaccatgaagaaattacgtttactttcagctgcagctctgaccgtcatgatggttgccgcagcgccggcaatgacatcacaggctgccatgtttacgacttgtgttccgggaaacagctccggtattatatttaattcaggaatgctttcaggaggtttcggacagagaggcggaaactgccagagcggaagcaattgtcagaacggaacagactgcttcggcggaaactgccagaacggaacagactgcttcggcggaaactgtcagaacggaacagactgtttcggcggaaactgccagagcggcaatgactgtttcggcggaagctgccagaacggtaatacaggagccggatggcagaacggaatccagacacttccttcatttggcggaatgccggtagcatccatgcagggttcctgcagataaacaggtaacgggagaaatcctaatatatagaataaaaaacagaccgtatagtgccagtccgaaaactgccgctgtgcggtctgtttatgcgttgccgcatcacttattttccttctgcaataatgatctcctgtgcatagggaagagtcttgatccagtcacagaaagtatgccactcagccagcttgtgatcctttctcgcataataaatattgatcagcgtctcatagttgaaggagcatgttctgagctggttatagctggaaggcagaagctgaatcatatcataccagtcatctttgcttttggtttccaggtatctgaggcggatttcttccagcttgtccacaacggaatgcataaattcctgcgttgcaggtgtcatgtggtcacagctgaaatcttccggcgtaaacggtttgcttgcgattttatgcatggtgctgcaggagtttgccacggttgcaattttatatgtatcatattctttccaccagtagagcggggctgtaatgtctacagatacgaggatctgacggacatatttgcggtggtcgctgccggccatgcgaagcttttttgccagattcaaatcattcggccccaggatataacggccctgctcatcgtagaagctgtccgtgcgattccagctgttcagcgggtttctggcgccgcgaagcgcattttccatattcattacgctggttctttctaatgtaatcatggtaattcctttcattggtttcctgttttattgatactaggattattatatcagaatcgaggtaaaaatcaaatggagatttagttaagcaggtgaggacgccgccggtacggccagcggacggggtggtgtatatgagtctttcgtcccgggggaagattgtcgtggtctggggctgcgggcgaagataagtctgcggagcacgctcccgctctgtgaaatgcatcacgctgctaagctcggcaggacctcgctaatcagcgatggatttcaacggcatccgcagactttatcttcccctccgccccaaggccaggttttcgccgggacgaaagactccgccaagtgtatcggccccgtccgctggcctgcggccgctaatagtctcacgcgttaagtgcgggggcggaccttgttgcggccactcagcgcttccgtgtgcgggaaatacgatataccttcaatgcgcatttttatataattgcggaaggtttgatttcagtttgccggaaacacgtggtggccgcgacagagtcctccccatttaaggttggagacaatcagcggccgtaacggaccatgtccggtgccgcgaaaatctccgcctgagtcttccgtccccggcgaaaccctgccccggggaagtaggcggaatcaattgcggaggggacatgggagtccgccggtgcttagcgaggtccctcacgagcttagcattccgatgcgcactccaaagagtgcaaacgttccccgcagcaattcattccggccggattccccctccacaaccaacttcccacggggacggaagactcagccatcccctcaccacaccggacatggtccgttccggacgcgtcctccaacctcagttaaatctccatttagagcgaggaataaccgtactgcacagactattatctatcggaaatatgtagtggcagcgacaaggtttccgtccccctgaggttggagacaatcagcggccgtaacggaccatgtccggtgccgcgaaaacctccgcctgagtcttccgtccccggcgaaaatctgccccggggaagtaggcggaatcaattgcggaggggacatgggagtccgccggtgcttagcgaggtccctcacgagcttagcattccgatgcgcactccaaagagtgcaaacgttccccgcagcaattcattccggccggattccccctccacaaccaacttcccacggggacggaagactcagccatcccctcaccacaccggacatggtccgttccggacgcgtcctccaacctcagttaaatctccatttagagcgaggaataaccgtactgcacagactattatctatcggaaatatgtagtggcagcgacaaggttcccgtccccctgaggctggagacaatcagcggccgtaacggaccatgtccggtgccgcgaaaacctccgcctgagtcttccgtccccggcgaaaccctgccccggggaagtaggcggaatcaattgcggaggggacatgggagtccgccggtgcttagcgaggtccctcacgagcttagcattccgatgcgcactccaaagagtgcaaacgttccccgcagcaattcattccggccggattccccctcacgacaccctccaaccggggacggaagactcagccataccctcgccacaccggacatggtccgttccggacgcgtcctccatcctcaatcaaaaatccattctgtccataacgcataatatttaccaagaacatgggagccgtcggtcgtatacgtttcattcagattgccgctttcatcgtcgaatattacattgacatcgatataagggcaattctcctctgcggcaatctgtttgataccctgattcagcgcattgatattttcattattgtaaatagggctccggtccgactttgttttggttacatgcaggttagcttccagaatcagggctgcttcgggctgcttttcttttatatagctaacaacggtccggtactgctttaaaatattttgattgccgtagcccagttcattgatgccgagcatcaggaagacggccttataatttttttcctccagaagctgatttaaagtcttatcacttccagcgccttttttcggtttgctgtccagtagattaaagacgctcatcccggaatctgcgaatacgtcggcatttcccaagtcgccgtattccgacaggccgaccgttctggaatctccgataaacagtacgtccgtcaaatcagggttgactgcaccaagttccttcttccagccgtccgatccaggttcgccgggagcgttgcctgaagtctttgacggctctgagggtgagggcggagactccgggggagcgggcaacggcgaagactccgggggagcgggcaacggcagagcttttagggagtcggagggacgcagagtctccggaagagttgacgaaagagcggcagatacggggaaggcaggatcccggacggcggctgatgcggcaaaatcttgtttcactgtctttccggcttccggtttcatcagaacacctccgatcattgcggcagcggcggcgatgaacaggctgaaggacaggagaatcgtataccagtatttgtgcattgctttttctccttaaaatctgaaatataaaaacgggtcatcggcgcctgcgcggatgcggtagatgcaggcccagaataaaagcagaaggatcactgcggtgataacattctttttgtaatgattgtagatatttcgggcagagctgttataaagacaagtccggccgtcaaagagccggaatacagcctgccgtatttcaaaaaatcaccattgaaataggtgagttgggtatttcgtgccaggaaaggaaaaagcctttggacatagactgatatatcagacagttccggtaatgcaaataccatccaggtcaatggaattgccaaagccatgtaggcatgtcctgcaagcggaaaacggtgcaggaaacgcagcagggccagcttttcaacggatatcagcacaaagaggagcaatccccaaagtagaaaattccaactggcgccatgccagaacccggttaagagccatacggaaaacagattgaagaaggtccgcgccggtttctttctgtttcctcccaacgggatatacaggtagtcccggaaccagtttccgagagttatgtgccatttccgccagaattccgtcatggacagagccatgtagggatgctcaaagttattgggcagtttaaagccgaggatttcgccaagccccttagccatcagagaatagccgtaaaaatcaaagtaaatctgcatgctgaatgcggtgagtccgagccaagctaatggggtggaaatgctctcatagcctatggccttgacatcattccagagtcctccgatttgatttgccagtaaaacctttaggcctaatccgagcgtaaattcgcgaagcccgttttccaggtgtaaaagtgagtgcctgcgtgctctgatttgcttccggacagaagcatacgtgacaatcggacctgctatcagctggggaaacatgcagatatacatgccaaaattgatgagggatggttcgaaacagatatccttccggtacacgtctgtcaggtaggaaatggcctggaatgtgtagaagctgattccaatgggcaaaataaaggcgggacttgacagccggaaggagcagcctgtttcagcaagtaataagttaatattttccgaaataaatccggcatatttaaacagcacaagccatgagaggttgtaaaaaattcccgcagccagccatcctttccgacagccgcttttccttctgcgtccaagtcttatacccagacggtaattgacgaagacggaaaagagcagaagcgccgcgtagagagggtggtctttgactccaaatgagtagaataacaggctccccgccagaaggcaggcgttcttccacctgcggggagtcaggaaatatataaacaggaatatcggtaaaaaataaaaaatgaaagtaagactgctgaaaaccataaccaggacttctcttttctcataagtattatttaataacaatagatagacgggcagagtgggcagaaagtttcaataaataaaaaatatatggcaggagacaatgacagatacgctgcacgaatgaaccggcgcctgacgcaatgtgcgcaaatgagaaaaacaatgagaaaacactcctgccaaaccttgtatttaaaagaaaaatatagtaaaattacccctgataaacttgagatggcggcaaagaaccggaaaggagaaaaaaatgacagtcacagatgtatccggagttggaaaagcagccgtgtttttaattaagggtgaagcaaatattctgtttgaggcaggaatggcctatgcggcagatttgatgatagaaaatataaggagggaactgggagacgggcaggtggatgccgttctgatatcccattcccattatgatcatgtggccggtcttccggccgtgcgcaaggcctggccgggagttaaggtatacggctcagagcgcgcaagggaaatactgctaaagccatctgcactctccgtgattcgcagcctgagcggtgacgcggcagaagcggcgggaatggactgggacaggaattacagggatgaagatctcagagtcgatgtcgtgctggaggatggagaaaccgtcaaaataggaaatcacagtgtcctggcgtttgaaacaaccggtcatacgaaatgctcgctgtcctatattgtggatggtgaattgatgctgtgcagtgagtcggtcggggtgatgggaccttatggcggttatatgccggcttttctggttgattatatcggcgcaagggaatccattttaaaatcggcgaaatatcatgtgaaagaaattatattaaaccattacggcccagtcagtgaggcggataagccgagaatctgggatattctgctggaaaagctggagggcagtaaaaaacagatgacggatgtaatgaaacggtgcacttctgatgaggaagcgcttaaagagctggagagaattttccatggaaatgtagataaaaaggagcagccggatgaggcgtttaatatcaatgcgctcagtatgatgaaaacgctgaggagacaattcccggaggaattccggtgatacgtatcctgtatctatatttatagaagagatagcgcttcagccggaaaacaaaaggaaggacaggtacggtatgcagttaattgcggcagtggataagaactgggctattggtcataaagggcagatgctggttgcgatacctgcggaccagaagtggttccgccaggaaacgatgggaaaaattattgtgatggggagaaagactctgctcactctgccgggggagagaccgttggacggcagaatcaatctcattctgacaacggataaaagctttaagttaaaaggagcggatgtctgccacagtgtggaagaggtgttgaataggatcaaatggtataaagaagaacggggatttacggatgaagatgttttcattatcggcggacagagtgtttacgagcagttccttccctactgtgatacggcgcacatcacttatattgattatgcttatcaggcggatacttatcttgtgaatctggacaaagagggctggattgtgacggaagaaagtgatgagcagacttattttaatttgtgttatgaattcaggaaatataagaggccataggaattaggcggatttttgcacatccggtatggcggatttgaacagacagcagtatttttggaggtgaagccacgtttttgcttgtctttatagaggtgaagtggtaaaatgtaggcaatcttttgcatatttattgccatcatccggcagcggcgccggttttgccggtctgccggaccgcataggccggtatacaaaagttaacgacaggttgaatagaacgaggaaacaggaggagaaacatgtatcagattttaaaagcggaaaagctggctgataaaatttatctgatggaagtggaagctcccagagttgcgcgctcatgcgaaccgggggagtttgtgattgtcaggatagatgaagagggggaacggattcctctgaccatttgtgattatgacagggaacaagggacagttaccatcgtgttccagacggtcggggcgtcgacggagcggatggcacttttgaaggaaggggataccttccgtgattttgtgggtcccctcggaaatccttccgactttgtgaaggaggacccggaggaactgaaaaagaaacggattctctacgtggcaggaggagtcggaacggctccggtatacccgcaggtgaagtggttaaaggaacacggcgtcaaggtggatgttatcgtcggctccaagacaaaggatctcctgattctgacaaaggagatggaggagcaggcggagaatctttacataacaacggatgacggctcctatggccgcaaaggaatggtaacggaggttataacggagctggtggagaaagagggcaggcgttatgatacctgtgttgccatcggcccgatgatcatgatgaaattcgtctgtctgctgacaaagaagctgaatctgccgacggttgtcagcttaaaccccatcatggtggatgggacagggatgtgcggagcctgccgtgtgacggtgggagacaaggtgaagttcgcctgcgtggacgggccggagttcgacggccatcaggtcaattttgatgaggcgatgaagaggcagcagctgtaccggacccaggaaggcagggctatgctgagacagcaggagggcgccacacatcacggcggatgcggacattgcggaggtgaggaataatggaagccagaagagacatgatggttaaagtaccggtgagggaacaggaaccccaggtgcgggccgccaactttgaggaggtgtgcctgggttataataaagaggaggccatggcggaggcggagcgctgcttaaattgtaagaatgccaaatgtatcgcaggctgcccggtggcaatcgatatcccggcgtttatcgaagaggtaaagaagggagagattgaggaggctgcccgcgtgatagcgaaggcgtcggctctgccggcggtatgcggccgtgtctgcccgcaggagacgcagtgtgaggggcagtgcatccgcggcatcaagggagagcctgtttccatcggaaagctggagcgttttgtggccgactggtccagagagcatggctttgtgccggaggcgccggagaagacgaacgggaaaaaggtggcggtgatcggctccggcccctgcggcctgacctgcgccggggacctggcaaagctcggttatgaggtcacgatttttgaggcccttcacgagccgggcggcgttctgacctacggaatcccggagttccgtcttccaaaggagggcgtcgtacagccggagatagagaatgtgaagaagctgggcgtaaagctggagaccaacgtgataatcgggaaatcggtgaccatcgatgaactgatggaggaagagggctttcaggccgtgttcatcggttcgggagcgggcctgccgaagttcatgggaatcccggggagaatgcgaacggagtgttctcagccaatgaatatctgacaagaagcaacctgatgaaggcgttccgcgatgactatgacacacctctgatgataggaaagaaggtagtggtagtcggaggaggaaacgttgccatggatgcggccaggacggcgctgcgtctgggagccgaggtacatatcgtatacagaagaagcgagaaggagctgcctgccagggcggaggaagtacatcatgcaaaggaggagggaatccgtttcaaccttctgaccaatccggtggaaatcctgacggacgagaatggctgggtaaacgggatcatctgccggaggatggagcttggggagccggatgaatcgggcagaagaaggccggtggagaaggccggttctgatttcaggattgatgcggacacggttatcatggcgcttggcacctctccgaacccgctgatatcggcgactacggagggactgagcgtaaaccgctggaaatgcattatcgccgatgaggccgatggaaagacgacgaaagagggcgtgtatgcaggcggagacgctgtgacgggagctgcgacggtgatccttgcaatggaagccggacgcgccggagcccgcgggattgatgagtacctttccggtaaataatggtcacagtttaaactgtctgaactgttacaaataatgtgcttaaaggggccgtctgtattcgagcgcgttttcaaatacgctcgaaccgcctctcttaaaatgaatgcagccctggccggaacgtagagtgtcggccggggctgttgctgattgaaggcggtaatctgcgggcggagaccgcaggctgccgccggctggcggaaaaagatccgcggagtgcattttttataatattaaattgttgagggaatatgaaatgaagaaaaaggtagatttgctccatgagccaatcctgcccggccttacccggctggcagtgccgattatggctacatcactggttcagatggcgtataatctgacagacatggcatggataggaagactgggggccggggcggtgacggcagtgggtaccgccggaatgtatagctggctgtcacagggaatcgtggatctggctaaaatcggggccaggtaaaagtagcgcacgctctcggcgccggcaatgaaaaagatgcggcccagtacgctaaatgcgcaattcagatgggactgctgtttgccgtgatgttcggcctgatttcgttctttggcgcaaagtatctgattggatttttcgggttgaaggatccggtaattattgcaaattcacagaattatctgaggattgtctgcgggctgattctttttccgtatatcaattcagtgcttacaggtatccttacggctaacggagacagtaaaacgccgtttaaggcaaatgtgatcggacttgcggctaatatggtattagatccggttctgatattcgggattggtccgtttccggccatgggagtagtgggcgccgcagtggcgaccgtcacggcccagattacggtttcatttatttttattctggctgtcagaaaagaagaggttctctttggcagcttccggttgttcaccgttaccccggtccgctatattaaagagattgtcacaatcggatttcccacttcgattcaaaaccttatttatgccagtatttccatggtactgacgagactggtgaccgggtggggagacacggcggtggcgattcagagagtcggcggccaggtggaatcagtttcctggatggtgggagagggatttgcggcagcagtcaattcattcaccggccagaattttggcgcgggtctgtttgaccgggttaaaaaagggttttcagcggcggtgaaaatgatggggatctggggactgatgacgacatccctgctgatatttctggcggaacctattttcagtatttttatccgggagccggatgtactcggggccggagtggaatatcttcggattctcggcctttcccagttctttatgctgattgaactgacatccatcggagcgtttgccggcttaggcaaaacctcgataccatcagtcctgagcataatcctgacttcggccaggataccgcttgcaattgtattttcctcgatgggacttgggctgaacggaatctggtgggcgcttaccgtatccagtgtggctaagggaattatcttttatatcgcatataagatgacgctgcggaaagtggagaaaagaatggggccggggttacaaaaaacgacgtaaatactcaaaaaaatgcctgtagttttgtgaaaagttttcagcaaaaaactatagacgaattgagggatacgtgagataatatgtacaagtatgatgtgataaaattaacaaagtactaacacattcattttgaaaggagtcttaaaatgatttattcacacgaagttgaaagtatgtgtccagtagcgcagggcgttaatcacggctgtgctccgattccggaagaagcaaaatgggtaaaatccagagaggtgaaagatatctccggtttaactcacggcgtgggctggtgtgctccgcagcagggcgcctgtaagctgactctgaatgttaaagagggaatcattcaggaagctttagtagagacaatcggatgttcaggcatgacacattccgcagccatggcagcggagatccttcccggaagaacggtcctggaggcgctgaacacagaccttgtctgcgacgcaattaatacggcgatgagagaactcttccttcagatcgcatacggaagaacacagagcgcattctctgaggatggtcttccaatcggtgcgggtcttgaggatctgggcaagggacttcgttctcaggttggtacaatgtatggaacattaaagaaaggtccgcgttacctggagatggcagaaggctatgtaacgggaatcgctctcgatgaagaaaaccagattatcggataccagttcgtaaatctcggcaagatgacggatttcatcaagaagggcgacgatccaactaccgcatacgagaaatccaaaggccagtacggtcgtgtggacgatgcggtgaagattatcgatccgagacaggaataagcgggataatcagcagggaacgtttgaaccccctgaaagagttacatagacatagacttaatagcaggtaaattattaaggaggatcatagagttatggcattatttgaatcatatgagagacgaattgacaaaatcaattccgtattaaacagctatggcatcgcttccattgaagaggctgagaaaatcacaaaagatgctggactgaacgtatatgaccaggttaagaaaattcagcctatctgctttgaaaatgcaggctgggcttacacggtaggcgctgccattgccatcaaaaaaggatgcagaagagcggcggacgcagcggcggcaatcggtgagggacttcagtccttctgtatcccgggctccgttgccgaccagcgaaaagttggtttaggccacggcaaccttggcaagatgcttctggaagaagagacggactgcttctgtttcctggctggccatgagtcttttgcagccgcagagggagccatcggtattgccgagaaggccaacaaagtgcgtcagaaacctcttcgcgttatcttaaacggtttaggaaaagatgccgcacagattatctcccgtattaacggattcacctatgttgagacagagatggattattacacaggcgaggttaaagaactctggagaaaatcttactccgaaggactgagggcaaaagttaactgttacggagcgaatgatgtgacggaaggcgttgccatcatgtggaaagagggagtagatgtttccattacaggtaactccacaaacccgacaagattccagcacccggttgcaggcacctataaaaaagagtgtttggaaaaaggcaaaaagtacttctccgttgcatccggcggcggcacaggccgtacgcttcatccggataacatggcggcaggtcctgcttcctacggtatgacggatacactgggacgcatgcactccgatgcccagttcgcaggatcctcctccgttccggctcatgttgagatgatgggcctgattggagccggaaataacccgatggtcggaatgacagtggccgttgcggtaagcattgaagaagcggcaaaggctgggaaattctaagaaatccagtaaaattaaggatttaagatgttgttaaaagtagaaaaaagtagggaaatgtatgtaactcatacattatccctacactacttctacacccatattcctacactaaaaacaagctattttattttttctatatcttctctcagccattccaaatcgcggacagtataagtagattctgttatgtcttgtatggtatgtccaaccatttctttaagtgcatactcatccataccggattttttccccatcgtaacaaaggttgttcgtggatcatgaggtctatgattcgggtttagattcaattgactaatcactttttcaaaacgattagcgtatttgtcgtacgttacagaccaggaaccggaatgtgtctgtcctttatcattaaaaagatattcactattgatagaaattgcaaatttataattacgttcaacgaattttaggattcttggatgaataggaactatccgttgcttccctgcttctgtcttcattccagcttgcatataccttttttctaaattgacctcgtccaaccgtaaggtagcgagttcttgcgggcgccaacccatataacattgaatgagaatccaatcagcaaattttacattatcaacattttgccacaaaactttcatttcatcatcggtaaatggaaagtgttttttcttgtttttctctatttcaacaataatgtctccagaaatttcaaatgttcttgcataattcataggaacgatttcatactcaagagcgtagtcaaacatagtattaaataaagattttattctggattttgtacttggcgatggatggattttttctcctttcttttttcctctcgtttcgattcgaaatccctcttccatacatcctttaatatgtcgagccctaacatcttttgcgcgcatatcgtatatggaagaacaatatgtccatgcggaatttacagaacgtatataagtatcagatgcatcttttaagtattcactgagccatttttcatacagttcctttatcgtaatatctggttccagatcatacgggttcttattgtattccaccagggccgtatatgcatcattgtacgttggaaaatatgactccggttttaatggtttacatattgggcgtccggtggatgtctttccaactgtgaccatagctcgaaaggggttcctgagattccgatttttgatttcgcttatctgtccgaaaccgttaggaagtcgccttcgcttgttattcttgcttcgaggctttcgttgtttgatatcgggttgtagcggatagccacaatgtgggcagaaagtagctttatcgctaacctgtagatcacactcggggcattttatcaacattctcaatacctccctaaatactttataaatcgagatttttgtgcggcaaggttgatttatcattagtaatcatatatgatagtgtaggaattgtcaactcctacacttaaactttttaaagggatgggtatatggttagcaatgaggaattaacctgccggaattgcggagcaaggttaaagaggtacgataatgtattgagaattgttcggattaaaggaagaaaaacttcatgggtaaaagtaaatcggtttcgttgtccttcctgcggacagatacgcagagaattgccggattatatttccccttataagcagtacgaagccgaagtgattcgtggcgtactagagggattcattacctgcgagacatatggatatgaagattatccatgcgagatgacgatggctcgatggaagaattcgcaagaattacaactccttttgtgaaagacaaaatcgaaaggagattcaggatgtcaaaagaggaaaagcacttacaaactaagattcgtatattcgaggatatgcttttacgatgtaagaattttggtcaggcagaagcgattcaaattgaattgacaagaatgagagcaaaactacaaaaattgtatttcaagagaatggagtcctaacaagggctctttcttttttatcgtttggagaactatttttaaagggatggagaatggttaaaaatcaaaagaagccgttggtggcggcttctcgtgatgaattactttgtgtagcattgcctgtaattcataggctttttggtgtctttattcttcagaaggaaaaccaggtactcgggtaaaagtttggattcctctttcggcttaaagcacttagaataagagacgtactgctttttgaccaatgaccatcacctccatccctttaaaaatagttctcctttcgatactttacattctaactgtggtttttcattcagtcaatgtaaatagccaccgaggttgttttaacaaattgcggttcttatcctagaatagccgttgaaaggaggtaacagccaatggaagaaattatatttgcgccggggtctgttccggtagcggtcgttgccagggtgtatgggaaagatgcttcctgggttcgagccggtatcatatccggatggctccctattggaaaggctactagaaacggaaagttgattaccaacattgaagagatgaattcgaagtatggacgcattaacttttatatttctccgaagcggctctgggaagaaaccggatatttatggaaaggagagaagcgttaatatgggaacaacgattcgcccggaattatctgagaaaaatccatattggattgaacgtcatcgctactatgaactgaagcatttctgtttacagtatccgatatggaagaaagcatacgccgccttggatgggcttagccggcggccttctgatatggaagtattttcaaagaatggggtggttggcgatccgactgctcgatgtgcagaagctcgatctcactatttagagcgtatgaagacggtcgagcaagcggcgattgcgacagatgcagagttatccacttacattttaaaaggagtaaccgagggatggtcctacgatatattgaaagctaggttaaatattccatgctgcaaggatgtttattacaacttgtacagacgattcttctggttactgaataaagcgagggattgaaatgaagattgtagacatagcagtcaaaaaagtctatcggtttaattgccctaactgccagagccggttggaggcggatacgaaagaactggaagatattggcgggaaggtgtgtaagttctattgtccggtatgcagaaaagaacgatacataacatggtctgaacttcgtaagaagattgtgtatgagggcgaaggaacgcagaaataacatctcctattgtgaaaggagagtgacacataatggaagaacttatgaaaatcaacgcaaaaattagaaaacaacaaattggtagactgattgcggctgggatatgtgcgtgttgcggtattggattgttagcgagttatagctaccaaaaaggtatcacggcatgccaaaaatcaatagcaaagttttacccagatgagtatgaatctttaacagcgaaggttttagaaacatttgaacgggaaggagttactaaattttaagagattgagccagcaatggctctttctttttatcctaggttaaaacacagtaccaaggtatctgaaagacatgctatgttgatatttgaaaaaatcccgggtgggaaatttagaaaaatctttttgaaaggcgggatggaatatggagctcattctttgcatgattgttggtatcattatcggaattgttttcggacgacaggtattccgaagggatgtcgttggttcgctgcgaatcgatcaatctgatccggacagcggaccttatttgtttttggagctgtcccataagggagcggatgcgatatataagaaaagatatgtagtcttgaaagtcaacatcaaagattatatttcgcacgaataacaagtccttttatggaacagttaatgaattcacgaaaggagaactaaaatgagtgaaaacatcaaagaattgctgaatgaggagatagcagcggagattcaggcgatatcttctctgaattcgggtagcgaagagaaatcaaaggctatagaggatctggcaaagctgtatcgtttgagaattgaggaaactaaaagtgagctggacgcagaggataagcgaagccggcgtacgttggaaagtgaagcgaatgtccgagagaacgagattaagaaatcacagttggacgaacagatcaaagctgacgtacaggatgagcagtataagcgttctcagcttgacgagcaagtgaaggatcgatatttcaaactggggattgcagcggcagagcttctcataccactgatgttctatggcatctggatgcggaaaggatttaagtttgaagaaacgggaacctatacctcaacaacattcagaggattgttcaatcgttttagaccgacaaagaagtaattaaccggtcagaaatgaggagggcgtgatttatacatgtcctcttcgtttttgcgtgatttttacagacgctattatggaaaggagatgctacaaagagctctttgtctcttgaccgtacaccggaagaaaccgtacaataatagcggttctttcgaaaaacgaaaggagataatatttatgagccacaaaattatcaaacccgaaggtattgaattgattgagtacctgaataacggatatgcgatttgtaatcggtgtggagccgtcatgaggcaaacagaagatccgaagactggatgcggagtttatatctgtccatcgtgtggattaaaggtggacgaagaggattacgagtatgagtccgatgaagaagtagaatggacggaagaaatgctcgatatggaacaaggagatattccgccagccggatgcagagcctgcggaggaccatacccgtattgcaaaacgtcatgtaagctatttgatgactaaaaatattattgagagaaggtctatgcttcggcataggctttttctttttggagaataaattatgcgataccattatgaaaaaccgaacatctatttgtcgatgtacggaaaagtatatttttgtgaccatccggtctatcattgctgcacgctgttccaaatcggagaaaagggactggcagttattcagcagagatttgacgagaaaacaaagagtacctggtggggagacgtggacccatggattacggatgatttatatttgcatcctcgttttaaagaatactttgatacacattccggaatggctatggacgggctttattccactgtgacacttcgccagattatgtgggccttaaaaatgaagccgattaagcgggaacgatgggagactgtatttgacaggagaaatatttagtccgcaaaaatcacagctccttttatggaaaactgattaaaagcgaaaggagtttaaggtgatggacgaaatgaaaatcagctcaaaatttacacggatgttgctttcgaaattagcaaaaggggtattacataaaaagcttggatataacgtagatatccagttaaacgagttgaatgcttcgatttcagatgagaaagcgcacgtacatgtgagtattgatgcagatatgagtaaagaagaactcatgaaaattctgaagaaaatcggtttaaattaagaggattgagccagcaatggctctttctttttacttcgcaaaatttacaattcctattatggagaaacagttagctcattggtagagcgtcacacttccgtggaggtaatcggttcgagtccgatactggttctcttttattttttatcaatcaagaaagggggattttaaggaggtggtcagaaatttgagtttggacgaattggcgttgattctatgtgatatgtacgaaatggacgaatggttgccaaatccggtattcgacaagaaagagttcactagggtgagcaatacattgtgggcgattggagaatttcgaaattatgtagccgatcatatttttccccagactaaaacgtccataaaaaatttagaagcgatggctcgatcatttacagaaaaaatggatgactttgcttctatgaatcaacagaacagttctatatttaccaccgctaagatggttggagaaaatattcaagatctgttatatgccatggaataggataaaacgaaaggagaatattatgcaaaaagttaaaatcttgaaaagagtcgggcgtcaattatatcgctcatctccgacaattttaacggtagtagcttctattggagtcattgcaacaaccattacggctgttcaggcaacccctaaagcaataaaattgttgaaagaggcagagctggagaagggcgaaaatctaactaaattagaaatcgtccgagtagcggggctgacttatattccttctgtactgctgggagtttcaactattgcttgtatctttggagcgaatgcattaaatcaaaagaaacaggcttctttgatgagtgcatacgttatgctcaatgaatcctataagcaatatcggaagtcagccaagacagtttacggagaggatgcggatgataaaatccatgcggaaatggcgaaagatgccatggtgtcttcctacgactggggttatcaggtttacaacatggacatggattctgaaagtgaacggttgcttttctatgatcttgcctcaaagaagtattttagaaccacaatggcagcggtgttaaacgcccaatatcatgtaaatcggaatctttccattaaaggcgattgttcattaaatgaatacttgtcatttttaggtgtcgaaggcatagacggaggcgatgaactcggatgggatatcagctatatgatagaagaaatggattgctattggttagattttgataattacaaatcaacgttggaagatggcttggagtgcatcattatagacacgatggcggtcaacaaatttgaatgattcgcaaaaattacagaccgtattatgaaaaggaggctaatgctttatgaaaaacaaaaattttatcaaagccattgggattgcagttacggtgatcggatttggagtaagtattcttaccgattgggtaaacgaaaagaaaatggatgagaaaattgaagaaaaggtaaacgaggcacttgccaaaaaagatgatgaaaacgaagaggagtcctaacaagggctctttctttttagtttggagcaagtgctgatgaatgatgaggctattcaaaaaatcatgaattatacgaatatgcatctgtttgaaccgggagaaaattggcctaaatcagccattatggaacgttcgtatgaacggtgggcggttgacgagattctactggccattatggatcatccgatgacagaagccgatttagtgatagaagggtttatattgaaaatggagctttttctttacctgtcggaaaatccagcaaataaccacatatttcaagttgcagaaaatacggccaagacacttctcggtcttattttataaccacaaattttattttcgaaaggagaaacattatgaaggcattaagaaagcagaaaatcgaaacagcaaacattcaggtaggagatcagatggtcattccgctggcagagcttggagagtttaccgcgaccgctcacaaggttacggacgagagcgtcatgtttatatttgacgaatatgttacctgccggccgatgaataactgctctacaaacaaaggcgggtttgaaaagtccgatctgaagaagtggatggatacagttctgtttatggcgtttccagaagagttgcgtgataagatttacggacttactattccaaccgttggacagattgttggtcacgaagacgaatgggataacaagaatctggaaccagatagcgatgaacagctgcctttgatgaaagagtgcaagaatcgaattgcttgttttgaagatcagcttacgtggggatggctgagaaatgctacaaaagaggggttttcttcggcttctttcgctcatgtgactgccaatggcaatgcggcctgccgcctcgcttcgtactcttatggggttcgtccggaattctggttggttaagccggaatccaggggccctgtgccccgtagatctggccgttatccttggggctttgatgctggttcagaagacattctgcattattgtcagaatgatgtaatggttacaaaagaagcagcgttaaagatggaaatttggaataaagaaaatgagattgatactctgagaaaggaaattgagaagttagaaaaatataagcagtacgataaagcaacagcggaaaccaaagtaattatggacagctttgttcgtgccggctttactgagaatcaggctcttgacatggttaaaacgatattcagtgtgatatttggaggaatgagataatgaagaaatcgaacatatcaaaagttttgtcgtcagttcgaacatccatggcaaagcacagccctgaaattcttacaggaattggtattgccggtatgatcacaacgactgtcatggcggtccgggcaacgccgaaagcactgattctcattgaggaaagaaaagaggaaattggagccgaggagcttgaagtcgcagatgtggtaaaaacaacttggttctgttatattccggcagcgattacgggaaccctctccattgcatgtttaattggagccagctcagtaaacgctaaacggaatgcagcacttgcaacggcatataccttatcggaatccgctctcaaggattatcagggaaaagtcgttaagatgttcggagagaagaagcacgaaactgtgaaagatgccgttgcaaaggataaaatcgagaaaaatccagtggtaacaagagaggtaatcattacagaaaagggaaatacgctctgctatgacgcgatttctggcagatattttaaaggcgatatcgacaaaattaagaaagcggaatgtgaattaaatcgtcagatgcgcgatgagatgtatgtatccttaaatgatttctactacgaagtcggtctggataatatcaaaatcggcgatgagttgggatggaatattgataatgggtatattgatctatcatttagttctcaattggccagcgatggaactccctgcctggtgattgattacagtattgctccgagatacaatttcagtgagctgatgtgacgcgcgaaaaaaacagtggctttaatggaagaagaaccacacattttcaaaaattgaaaggagaataaacatggaaaccaatgaaatcatgaacaacgaagaggttatggagacagccacagaggaaatcgttaaagcgagttctggtaaggggtttaaggttgcggccggtatcggtttagccgtacttgcaggtgttgtaatctacaggtatgtgggtaagccgatgattgccaaaatcaaagctcagaaggagcagcagattatcgatgctgagtgggatgaacccgaagaaccaatcattgagaatgaaaaagaggattccgaagaagcctaaacgaaaaaatgtgcttcaacacgagggagagtacctgtaacaaggtgctttccctttttttcttttatccggaggtgaaatttatgaacatgtattcgtatgatggcccagttatggaatttgacaattgtgttgcaaatcgctggattgcttctacacgggcagtttcagaaaagaaagcaaggtcaaaccttacttatcagtttaaaaagaaaaacaaccgacttccgggtacaaagattatattgcctggaaagatcagtttggtgagcggaaaggagacaacttaatggaggaatataagccgaattcccacaaatcaaaggaggagcagaaaaatcttgttcccgaaaaacgtgtagagaaagtgatttctgggacggtaaaatcaaagaaaaaatcagaaatgcagaagtttgcagacgtattcatttctgaagatgtcaataacgtaaaatcttatattgtgatggatgttctggtgccggcaataaaaaaggcaatttccgatatagttaccaatggtattgatatgatcctctatggagaaactgggaagtcaaaaaagaactctacagcgtccaaggtatcctatcagaagtattacgacagcggaaagaaagattatacagcaccgaagagccggacgagctacgaatatgatgagcttttattcgaaactcgtggagatgcggaatcggtattagacgccatgaacgaaattattgcacagtatgaggtagttagtgttgcagatctttatgatttggcaaacgtatccaatgacaattatgctgccaataaatacggatggactgatattgctggatgcagggcggttcgagtaagggatggttatattttaaaattgcctaaaccaatgccgttgtaaaggagggattcaagatgtatgagtcagaagacaggatggtatctcatccggatcattatatttcagaaacgggtatggaagttattgatgtgattgaagctttcacctttgatttaaaaggaattgaggctgccgataccgcgaatatcatcaaatatgcctgccgttggaagaagaaaaacggaatccaggatttggagaaaattctttggtacacgcagcatctgattgaccatttaaagaaaacagaaaaagtagaagaggagaacaaataaccatgaaaaaaacagagattgtaaagagcatgaatggttttcttagcaagaccggtttccagttaaaaaaacatagtccggagattctcgtcgtggccggcgttattggcgtggttacaagtgctgttatggcttgtaaagcgacaacaaaagtggacaagattgtggaaaacactaagaacgatatcgacaaggtacatacagcgacagcgacaggtgttaccgaagccggggagtcttactctgttgaagattcaaaaaaggatctcactcttatttatgtccagaccggagtaaaatttgctaaactgtatggaccctcggttgtacttggcgcattgtcgattaccagtattttggcatctaacaacattcttcgcaagagaaatgtggctctgggagcagcttatgcggctatcgataagggattcaaagagtatcgcagtcgtgttatcgagaggtttggtgaagaggttgaccgtgaattgaaatataatctcaaagccaaaaagtttgacgaaacgattatcgatgaggagactggaaaagagaagaaagttaagaagaacggatttgtggtaagtccggcggatatcagcggttatgccagattctttgaaaagtacacgcaggatgaagatgggaattccattctgaatcctcactgggaaagcaataatgaatataatctgatgttcatcaaagctcaggagcgttatgcgaacgatctgctgaaagcgaagaagcgtgtatttctgaatgaggtttatgagatgctcggacttccgagaacaaaagctggtcagattgtgggatgggtttacgatccggaaaattccaagggcgataattacattgacttcggcctgtattctgataatctgagctattcggattatgtcaatggatttgatcaggcaatccttctggatttcaatgtcgatggaaacatctgggatttgatgtgaaaaaatataactatccctaggagttactgtaattcttagggatagctttttatttgggaggaatttatgcgcaggttaatcaaagtaataacggttccgatattgtgcggtatcatgatagcatcttcattctttgtatctgaattccgctcagaaggggaagacgttgtagcaatacctagggcaagcattgtcgaaaagacagaaccgattattacggtttcgcaagaggaatccattccaattgccactgagaaaatggggagatcagaagaagctataccaaaaatgtcgagagaagatgtagagttaatcgccctggttactatggctgaagcagaaggtgaatgcgaagaagggaagcggcttgttatcgataccatattgaatcgggtagattctgaacactttcctgatacagtatatgaggtgatttaccagccgaatcaattttcatctatgtggaatggccgagtagacaggtgtgaagtacgcgaggatatttgtgaccttgtctacgaggaactggagtcaaggagaaattatgatgttgtattctttacagcgggagaatacagcgcatatggcgttccaatgtttcaagttgaaaatcattatttttcaaagtatgagtgaagaaaggagaatcattatgcgtaatcttttagcatttgtgtcttatacattagcggctatgtcgggtatctgtttcgttggtgggattgcaattctgtcaacgggaaaggagcactgatatggacggactggaaaatgtgatatcggtactggactacgttctggacactaagagaaaaagacatattatgggaggcattctgttgagtgtctccttcctttttggcggtttggcaataaccgtaatgacaatcaggaatgaggaggaagaggatgagcagtaaaggattgactttccttgcttttattgctggagcgggaattggttctgtatgtacatggcaactgctgaaacgaaaatatgagctgattgctcaagaagaaatcgactctgtaaaagcagcttatgccgaaaggaaaatcgtagaggaagcgggaaagagttttgtggaaggttttcgagatggccttaaagtagcagaagatagaacttcgaaggatgaagatgacatggatttcaaaaagtacgcatctatcattcagaaagagggctatacggattattccaaaacggttgaggaaaagaaaggagcggcgtttgtggaaaaaccttatgtcatctcgccagaggaatttggcgaatttgaagagtatgaaaaaatcagcctcacttactatgcagacgaagttctggctgatgagaatgatgaagaggtagacgatgtggatgaaattgttggtaaggaatctctgaaccatttcggagaatatgaggacgactctgtgtttgttcgaaatgaccggttaaagtgcgattatgaaatcctgcttgaccagagaaactattctgatgttgtaaaaacgatgccacatcgaatggaggagcaatgacaaagaacgagcttaatgatgcatattttaactggatgtatcagcttgtatttgatggaagatattcaaagagattatcgtatcgaaagcttttaagagagctgcatcgaatcgaatttacttacagtattccgatggatggaaatcgagcggaagatggagtggatttaaggtatcggtttggttatgaaaacggatacagcagctctatgatttccgtatatttggacaatcggatgtgcagcgtgctggaaatgatgattgcactagcaattcggtgtgaagaacatattatggatgatccagacattggaaaccgaactggacagtggttttggaatatgattgtcaatctaggattgggttctatgaacgattccaagttcgacagggattatgttgaggatattgtccagaggtttctggatcggaagtatagccgaaatggcgatggaggactgtttactgtaaatcacagccgatacgatttgagatccgttgaaatctggtatcagatgtgctggtacttggacgaaaatacttagaagaaggagagattaccatgagccacagcgaagtaatgaagtggtttgaaagttattttcccgattattctggagatcggattgatatgtggtttccaaatggaagaaacagcatccgtatccgccagaaaaatggtcaggaatttatattcacttatcataatcagaaagattggaaatttgagacgattaccagttttctgaatggaatgaagggaggaaaaaagtaagatgtgtgaggttatgaattatattttcggaagtctcagcaattcggaggcggcaatccggtccattcggaaatctctgaataaacaggcccattataaccggaaattaagcacgattgctcttatcataacggttaatctggttcttctggagctggatcgtgtggagcagaaaaagaggattgagaaactggaatcgacaatagaggaaatgaagcgcgataaaggagagtaaaaaatgagatgatcgactttttgatgatttccacacgtagtacaaagcgtggtgtaattgaaatctatccgaagttcattattaagaaaagctccgatctgatgattcgaggtggtgacttctacgctatctggattgaggaacgaggtttatggtctacggacgaacaagatgctttgcaactcattgaccgtgaactggatagatacgcagaagaaagccgccagcgctttgactctgaaattaaagttcttcacatgtgggatgcggaatccgggatgattgattcctggcataaatattgtcagaagcaaatgcgggattctttccacatgttggatgacaaattgatattctccaatacaaaaaccgataaaaaagattacgccagtaaaaagctgaaatatccgcttgaagctggcgatttgtctgcttataacaaattgatgtctactctgtactctgagactgagcgacggaaaattgaatgggctattggttctgtggtatgtggagaatcgaaaaaactgcaaaaatttatggttctgtatggagctgccggaacaggtaaatccacagttctcaatattattcagcagctctttgaggggtattattctgtttttgacgcaaaagctttgggttcgtccagcaattcttttgcattggaggcattcaagagtaatccgcttgttgcgatccagcatgatggtgatttgtcaagaattgaagataataccaggttaaacagcttggtgtcccatgagctgatgaccgtaaatgagaagttcaaatcgacttactccaaccgattcaaatgctttttgttcatgggtaccaacaagccagttaagatcacagatgcaaaatctggcttgattcgacggctgattgacgtatctccttcgggaaataaactgaatccgagagaatacaaagcgattatgaagcagattgaattcgaactgggagcgattgcatatcactgtcaggaaatctatctaaacaatcctggtctatatgatgactatatccccatcgcaatgctgggagcatctaatgatttctataatttcattatcgattcctaccatgtattcaaacgggaaaacggtacaaccttaaaggctgcctgggaaatgtataagacctattgtgatgaagcaaaagtaggctatccgttttctcagagaatttttaaagaagaactgaagaactatttccatgactacaaagagcgattcaatatggaagacggttcaagagtgagaagctattatatcggattccggactgaaaaattcgaagaggaaacgattgtggaaaagcaagaggaaaaaccgtcatcattacaatttgatacggtcaagtccgtttttgataaagtgtgttccgattgtccagcacaatatgcaacggacaaagaaacaccttctatgaaatgggacaaggtaaaaacgaagctgtctgatttggatacttctaaaatccactatgttaaagtcccggaaaaccacattgtaattgattttgatattccagataaggaagggaacaaatccttcgaacggaatgtagaagaagcaagcaagtggccggcgacttatgcagagctaagtaaaagcggaaagggggttcatcttcattatatttatacgggagatgtgaaaaaactgagtcgtatttatgacgaccatattgaagtgaaagtgttcacgggtaaaagctcattacgaagaaaacttacaaagtgtaatgatttgcccatcgcaacgattagctctggtttaccgatgaaaggagaagataaaatggtaaattttgaagcgattaaaagcgagaaagggcttagaacactaatcaagagaaatctgaataaagaaatccatccgggtactaagcccagtatcgactttatctacaaaatactggaggacgcatattccagcgatttgagttatgacgtgacggacatgcggaatgcggttttagcatttgctgcgaatagtacgcatcaggccgaatactgtatcaagctggttaataagatgcagtttaaatcagcagacccttccacagcggggagaaacgaagaagcaaagttggtattttacgatattgaggtatttccaaatatgttccttgtaaactggaaaatcgagggcgaaggaaagcccgtggtgcgtatgattaacccgactccaacggagattgaggaattgatgcgattccggttggttgggtttaactgtcggcgatatgataatcatattctgtatgcaagactcatgggttatacaaacgagcaactttataacctctcgcaaaaaatcatcagcggcagccccaattgtttctttggagaagcctacaatgtttcttatacagatgtgtatgactttgcatctgctggaaataaaaagagcctgaagaaattggaaatcgagatgggtatccaccatcaggagttgggacttccgtgggatcaaccggttccggaagaaatgtggacgaaagttgccgagtattgtgataacgatgtaatcgcaaccgaagcggcattccattatctgaaagctgactggacagcacgacagattctggcagatttggctggaatgacggtgaacgatacgaccaatacgcttacacagaaaattatatttggaaatgagcggaaaccacaggatcagttcaattaccgaaatctggcagagccagtgcatcaccttgatgaagaaacctattccttcttggccgaagcgtgtcctgaaatgatggcgcaaacgcatggcgatgaaggaagtctcttaccatattttcctagatacaagtatgagaatggaaaatcgacatatcgaggagaagaagttggagaaggcggttatgtctatgcagaacctggtatgtacggaaatgtggcattgctggatatttcctctatgcatcctcatagtgcaattgcagaagttctgttcggtgtgaaatttacgagagccttccgtgacattgtggaaggacgagtcagcatcaaacacgaagcttgggacgaagtcaatcatatgctggatgggaagttgacaccatatatccagaaggtcattgacggagagatgacagcaaaggatttagcgaatgctttgaagacggcaatcaactcggtatatggtctaacttctgctaatttcgagaatccgttccgtgatccgagaaacaaagataatattgtagccaaacgaggagctctgttcatgattaacctcaagcatgaggtacaggaacggggctttactgttgctcacattaagacagattctatcaagattcccgatgcgacgccggagattatcaagtttgttatggattacggaaagcgatatggttatacctttgagcacgaggctacatatgaccggatgtgcctggtaaatgacgctgtctatattgccaagtataaagacggaaaatggacagccacaggaactcagttccagattccctatgtcttcaaaaaacttttcagcggcgaagaaattgtctttaaagatatgtgtgaaaccaagtcggtaagcagcgctttatatttagacatgaacgagaaacttccgcagcttacaaccgaggaagaaagggaattaaatgccatcgacaaggcttggaatagtcaggctggagggaaatctcttgaagatgtcgcatctaaatacggatatacatacgaagaaataggagcaagatacagcgagctctgtaaaaaagacgaggcgactcacaattatattttcattggacgagttggtcagttctgtccgattaaatcgggggctggtggcggattgctcatgagagaaaaggacggacgatattatgctgccactgggtcaaagggctatcggtggttagagtccgaaatggttaaagaactctccaaagaggattctattgatcgttcctattatgacaagcttgtagacgacgcagtggaaaccatatccaaatacggtgacttcgaatggttcatatccgatgatccttatattccaaaacctaaactcgaggactttatgaacattccagaagacgctgatgaggaaataccatttaattaaagaagaggagaagtatattatggcttacaaaaatgtacccaatatcattattgaaaacgcaagaattatttttcgaaacttccgaggcgaagagtctaaatacaatcgggctggaaaccggaacttctgtgtcatcatcgaagatccggaacaggcggagaaactctccaatgatggatggaatgtaagagtgctggctccgagagacgaggatgaagagccgagacattatattcaggtggcagtcagcttcgagaatatcccgcctaaggtgtatatgattaccagaaagacaaaaacaccgttggatgatgaatccatttccactttggactatgcggagattcggaatgttgatttgacgattcgaccgtattcttgggaagtgaatggtaagaccggaattaaggcttatctgaagacgatgtatgtcaccatcgaagaggatgagtttgctgaaaagtatgcggaggaagaaggcccggaagaagttccattccactaacaagcgacaaatagggtgcctgatattgccagcaaggtaaatgtcctaaggctagaggaaacagccctttattttgcgaaaggagaaaagctatggcattttggaagcggaaaaagaagcgaaccacagcgaaaccgaagatcaatgcttctatttccaaggtcgaaaaaccaaagaaaatatcagagaagcacgactttgtagttcataaagaggaacatcaagtaagcttatcaccgaagccgaaaatgaaaaatcttcccactttcaaacccgacagatatgagaaagaatttatgaacatctttcgtcaacttgtttcagaaaaaaacagaccgtgggatatttggaaagactttattgttatgtcggcttgttctatatcaaattctgtggacaaatctcaatttgatgagcgagagaaacgatacttggatatcattcgccattacagtaagtcaaaacaggaactttttccacagttgtttgcaaatctggtcatgtctttagaaatgaatccggagcaggattttttaggaaagatgtatatgagcttaaatcttggctacgatgagttgaaacaaatatttactccttatgatatgtgtcggcttctggcaaaaatcaccattacggatgtaactgagaaagtaaggaaagatggctatattaccatcaacgatccatgttgcggagcgggagccaacttgattgctgctattcacgaagcacgaaagcaattagaaaaagaaaattataattatcaaaaccatttattagtttccggacaagacattgaagaagttccagctttgatgtgctatattcaactttctcttctaggaattgctggatattttaaagttggaaattctttgatcaaaccaatgactatggctgatgatttgaagaattactggtttacacctatatatttttcagatgtgtggactatgagaagattatttcacagtatatgaaagtttatgaggagggataagcgtgaatgaacgattgaaagcattagaaaaagagctggatagtctgttaaatatggctcccatagaagatgactgcacgaagaatgaaaacgagatgtactcggatatggcgaacctgaaaaacagcataacagcggttcttgaggagcaacggaatggccgttgaattgtatgactatcaaatagcagcagtaaaaaaaatgaaaaatggttgtattctgtgtggcggcgttggaagcggaaaatcaagaacagcattagcttattactatctccagaatggcggaaatccggattgcttgatgggggttgaggattatgttgcgatggacgatcccccaaaggacttatacatcatcacaacagccagaaagcgggacacgatggaatgggagggtgatctttcgcctttccttctttcggttcacgaggatgtcaatctatattcaaatcagattgtcgtggattcctggaataatatcaagaagtacgaggatgtaaaggatgctttctttatatttgacgagcagagagtgataggctccggagcttgggtgaaggcgtttttgaaaatcaccaaatcaaatcagtggattctattgtctgcaactccgggagatacctggcaggattatattccggtattcatcgcaaatgggttttacaaaaaccggacagaattcatccgagaacatgtggtttatagtcgattcagtaaatacccaaagattgaccgatatttgaatattgggagattgattcgactcagaaatcgtattttggtgaatatggatttcaagcgtcagacggtttctcatcacgaagatatatttattcgatacagcatagagcgatacaaagatgttggacgaactcgatgggacccgtataagaatgagccgattgcgaatgccgccggtctttgctatgtatggcggaaaattgtgaatacggacgagtcacgacagatcgccttgatggaaattgtagagaagcatcccagagccattatattttacaactttgattatgagctggagcttttgaacgggctgtttcgaatttatgaagacgatggagtctttgaaattgcagagtggaatggtcacaaacaccagccaatcccagagtcgaaaaactgggtgtatcttgttcagtacaatgctggagcggaaggatggaactgcatcaagacagataccattatattctactcacagaactattcttacaaaatcatgcagcaatctgcggggcgaatagacagattgaatacgccattcaaagatttgtattactatcacttgaaatctcgtagtgggattgatttggcaattagtaaggcactgaaagataagagagattttaatgaatcgaggtttgtgaagtggtgaaaggagattaaccatgaatgaagagtatttggaagtggattttaaaaagtattgtaaaacctgtaaacacaaggaattgggagaaaaattcgacccgtgtaatgaatgcttggattatggatacaatctcaattcccagaaacctatgaagtgggaggaaaagaaaaaatgagctatcaatatgaccgatatttggcgcaacataaatccaacgttgaagccggatttcgttggttgcagaaaaatcttcctgaaattacagagggcagtggtgcggaacacaatatcgtatttgcacatgaccaatccaaaacggagcccgatgagtatggcccctatgatatttatttttatggaggcaatcgctcttatggagtagttgaggatttcagaaaagcttggctgttacatattcatcgaaaccctcaccattggcagtattgggtgcttatcaatgacgctcccgaagaaggagaaattattttggaaatgccttactgttatgttctggagatgatttgtgattggtggtcctttagctggtttaaagggaacctgctggagatcttctcttggtatgaggagcggaaaagctatataaaactgcatccgaatacgagaagattggtggaggatatcttaggacgtatcaaaaataagcttggggaggtgatagtgaatgaaatcaacagatagtgttattgtgagttgggatttttctcatgggaaagacgctggcgttctgattgttggaaggcagcaaaaaggaagggtggaaattatcaatgcctatcaaggggaagaagccaaagaaatttatcaaaagctggtattccacaaatctaagaaaatcaattacagcgaggagaaaaccacatgaagcaaccgaaaaaattgaccagagagcaaaaagaatgcttatttgctcattatttaaactgtaaagattggatgttggttgacgagacagagttctattatcgcattatcaataagaatacgggtgtgataaagagtgtagataaattcagaagagttagaaggagaaaaaatcatgagaaaaattaaaaacaactggaaagtagctttaattgtagccgtcggtattattgctattattttgttaggtgtgttttgtatacagagttcccagaacagagcatttaccttggaagagcaagttaatactgctgattctgacatcaaagttcaggaaaaacgacgtgtagatttggtttacaaccttgctaattgtgttaagcagtacgataagcatgaagcggaaacattgacggcgattgttgaaaatagaggctctaccggtgatatcgaaaacgttactacagctatcacggcggtgtcagaagcgtatccagaattaaaatctaatgaaaattataaagagttaataaatgaactttcaattacagaaaatttaattgcagaatatcggagtaactacaataagcaggtaaaagaatacaaccgatatatacgcaaattcccgacaagattttttctcaatattctcggatatgaggttcgggatatacctatcttgactatagtgctcctgccgatgctccgcagaatctgtttggagagtaaaagctatgagaggacgcaagcgtagaagttttgatttcgggaatttcgagattacgaaacgggaaatactggtaagtgtatcgattgtcgctattatgcttctgattggagtccttattgctggaaaaatttcggattatcaattggataaaaatgaaaaatacaacaaggcgataaaaatagaatctcaggaactgtttgagtacggaatgaggactaatgccgggaacgcttttgtatatggcgatttgaaagcggtcgatacagttacatatcctggaattggtggagaatacatttatattgaaaaagtgaaagaacgatatacaatgcatactcgccaggttgcacatacaacaactacgaatggaaaaacccatacttactatacaacggaaacctattggacatgggattatgctggtagtgaggaacagatatgtgatgaaatatcatttttaaattacgttttttcagttagtaaaatcgacctgccgggaaaggagtatatagacactgttaaagaatccagccacattcgttataagtattatggagttggtttaaactttaccggaaccatatttacagaactggctgataaaacaatagccgataactcaccattttatgaaaatatgaagattgatgaaaccgtagaatacttagaaaccgattttgcaatgtggatattctggattatttggatggtcttaattggagtctgtgtctacagtttctattatatcgacaacaaatggcttgagtaattggagaatttgggagagggtcgagcaataatgagggcgaccacaaggtggatatagtagttgcataagggatgagtccgctataagaaaggagaaaaaacgtatgaatcttaaatcagtgaaaattattgcagtagatttcgatggaactttatgtgagaacaactggccagggattggagcgccgaacgaagaactgatagagtatcttcgtaatcggaaaaaggatggagacaagttgattctgtggacctgccgcgtggaagacatgcttcaaaaagctgttgagtggtgtaaggagagaaatctggtgtttgatgcggtcaatgagaatcttccggaaatcatcgagaactttggttctgataccagaaagatttttgcaaatgagtatatagatgaccggaatattcctttgtcatcctgccgggaaaaatccaatacgcagacatgggctgaaaaagaggtagagattgcttgtgagaacgaaagaaaagcctccggaacaaaagaaggggagtgggattatggttgcgcctgctacgaaagtgctctgaaagcctatcacagtctgtccgaggacggccatagcggtttcagtatcggtatgactaaatatattctgaatcgcctaattgacggaaagccacttacatcgatcgaggatacagaggatgtttggagtgatattacggacctttcgggatatcgcggtgaaattgtaaactatcagtgtaagcgaatgagttctctttttaaatatgtatattctgatggaaccgtaaagtatcacgatgtagatagatactgtggaatcaatatgaacaatccatatgattcctatcatagtggattgatcgatcgggtaatggaagagaagttccctattaccatgccatattttccggcaagtaaaccatttaaggtctattgcgaaaattttttagttgatccggaaaatggagattacgacacagttggaattttctatacaattacaccagaagactgtacagtgaagcttaatcgcttctttaaagaagaaaatgacgaatttgttgaaatagccaaggctgagtatgatatgaggaagcattgtcatggctgtttcggagccgctaataatgattgtctgcgttgcgaggaggagcttcagtatgaatcggaataggtttatccagggattaaaaggtgatattcaattttctgaaaaagaaagatggcgtattattcgcagaagccttcaaaaacattcgtggaaaacaaaatgcaccgtggcaatggaagaatttgcagaacttcagcagcaaatcagcaaacagattcgtggatatgatgacagaattggactcttggaagagatggcagatgcttatatttgcctgaacttcctggagtccatttttgatattaagccggatgatttacagaaagcgattgatgtgaaactggagcgagaaaggagaaattgtcagtaatgggattatcaaaactttcagaagaatgcaagaattgcccgtttgtcagtcggtgtaaaaataagcgaatggaagcactggcgtatatgactgaaacacaagttttagcaaacgcggcagatccaagtttcgaaaacttagcagcgtctttattacgagaaactatgacaattatggtaaacggtacgccaaccaaggtttataaagacgaaatagaaaaacagatttattcccagttatattcagggttaggcttgaaattaggaagttaaaaaaggagaaagtttatgaatgaaaaccatttgagtcctctaccacagtatcatatcgacagagataaactgtgtgagattgtaaaagaaaccgttggctacgatagacttatggacgcattctgtcatggaactgtcgtttgtgatgaatttgcttggttttctaactccgatgagtattacatcatccatttggaaagtggcatgatggtaaattggtataaacatctcggaaggacaaacacttgctcacagaaagacagaactattgatgattattacgagttcttcagattatttaaagaagaattggactattttgagaggagaaagcgatgattgaaagtttgttaaaagaactgggagaacgccattttgaaattctttggagatatgagagcgcaacgaattctatcgttattcagatggataaaagagaccgtcatcaacggcatgggttggttcgtaaagttatgttcgatgactttcatcgtattagaagcaatcagtttgaatttgttatggttcgatttttaaatgaaatggctcaggaactggagtatcgaattaaagtcgccccagaacccatgaaaggagaagacaatgattaaaattgaaaatgtagaagttatgggatgggaacacactatccgaggaatacggaatacgatgggcagttggaataaatccgatagcggaatctgcaaaggtggggatgatggtatcggatgcgagaattgtgtcaattgcgattcctgcgagcatgcatatgatcattcctggcagctcggtaaagcagaccacgatttgatgatgcgacttgaggatgcggggtatcggcgaatgattacggtgaatctggacatcacggctccgctgtattggtggaaagatttttatacctacgaggttggtgcggtggctgattcctgctctgcgatgtctgaactggctgcgaaggcgtttacattggacgatttttcgtgtgagcatcttgatattcggaccattaaagtgctagaagacgttgtaaatgtgttaaacgactatatgactttatatgtaaattataatgctgatgatttcgaaatcaaaggatgcccaagtaaagaaggtatttggtggcagatgattcagcttcttccctcttcttataaccagaagcggacggttatgctgaattatgaaacactgaccggtgtttatcccatgctaaaaaatcatgagctggatgaatgggtagaattccgcaagtggattgaggtacttccatattctgaaattatcattggtaaagcgatggggataaaacatgattcaatattatgagtctatattttacaacactttggaagaactattagcaacctggaaacccaaccatccggatgttttgaggttgagagcaaaatatggagaagatattcaatttagtacaatcgcacatcgaagtggtgtaaagcctcaatttgaactgagttgctacgaactaaaaaaattaaaaggagagcgtaataatgacatttattcaatatctaattttatttagccttgtatatctttatgtatatgctctgattggtagaatttgtaaatgcatcgaacattgtgctaccgccagagcttattctaaattcagagagaatggagttatgactaaaatggacgatgttgaggctggtattattaaaatcggaaaagagagggaggatgcaagaaaaaatgtggtgtcgtaagttagtaaaaaataaaatctatgccgttctgtttattcttctaggagcgttgtcagtcccgattgaatgggacgcaacgttctttttatttaccctgattatgggtggatgcttattcttttcgaaagagaattggatttatgaaggagaggaagacgatgggacgagccgagagaaggcgtactcaaaagttagaacagaaagagaaaaccactacatataatctcacaaaggcacaacttgatgctatggttcggaaaaaaatcggagatgaacttaccagagtaaagcaggaagctaccgatgatgcggtaaataccgcgatggttctgcttctgactcttccactggaagtgctgatggaccattattggacaaaatcctatgcaaagagaattccgaagtttaccgaacgagttctggaatactacgaacgatggcaaaatggtgagttggatatggaaaaactgaaagaggatttgtgggaatatggtggtgtgaaattagttgaaagtgagggtgaagcaacatgaaatgtgtaatgggagttattgcgtgtattgttgggctcgtgggtctgatcggactgattgtgttaaaggcgaccagctcttctgcaacttatatggacgattcattccggtggggaggacgagatgggcgttaaaaatgattatcgtaaaaatgcagaagggtattccgatccgactgcctgtgaagcactgagaaacattgagcgggaagaagaacggttccataagctgctggatacgatttttactctttgtgaactgtccgacttccacgttgaagagcggatcgtcatcaaggacaaacgaaccgggcgaatttggaggtagcttatggatatgactgatttacagcgagcgattgatacacttgtagaagtttgggaaaagtttacagcatctataaaagagatggcggatgctctgaacaaggcgtttggagtttcgacacctgagaaagagaagaaaaagagtctaggttctccggctcgatatgggatgtctttgcggaaatctcgaagagaatccttcgttaagcagtattcgtatcggccaattgttcagaaacacttaccttatcagagaaggaactattgaaaatcgtccgtacaaagcttgaaagtgggtgaaaattatgcccacttttgagttttgaaaaatgggctttggccacttttatgtgggctttttgagaaacgcagggaattttggggaaggattcggacgattttggtcaaatttgtggccatttgcccactttctgcccacatttaaaaccccgatttggtcagtaaaaacccagtatttatgcgggtttgtgggctcaaagcccactttcccactttttttcttaaactattatgatagaaagtttaaaagtatatagtaatagcgcaaaaaaagtgggtttttggccacgagcaaaaaatggaggaaatcatgagcaagattagttgggagagcttgtatgaaaattttaagtcaatctatccaaggttgtcgcggtcatccgtatattttcgtccgttcggttatatgagtatagtagtgtattttgagaatggaatgaagatggtctatgatgatctcagaaaacaggcatatatcacagcttaaagaaaatgtcaagagataatgaaaaatttcttttcttctggaaaaatttatgatatactgtaagagccacacaatctaatatcgaatccgtttaagggaattcacttcggtaaaaggtgtattctctctttactcataccttaaacggaacgagattgtgtggcaacaatgggagaacacttttttaggtgcgtctcttgttggggccgcaccttttttattgcgccaaaatctatctgactagaggacggtgacattgtggatagaccatatacagaaatacaagttctaaaaaaattagatattcctgactttcgtcatctgacaaaggataaagtcatagcatttgctacaatgattccgggaatggaacctgaagtggcaaagaaggctttagagcagtttcctaacttcgtatcgacatctcttgaaattatgaaagagtatcggggtattcttgaacagttgatgaatgatgacagggatggtgcggaaatatgttacgatatgtataatcgtgtgatgaattctcttgagtgtattcttgaagatgacaatttgacctttaaagaaaagacttacatactcgaacaaatgagagaggttgccgatgaaatatcgaaaaaggattccgaaaagtcggctaaccgcataaagttaatagggattgtgagtggagtggtggcgggtgttattacagttttaggtaccgccattggggtcaatttaacttctaagcaaaacaatattcccggcgatgacgaagaagaaaaccattaaaaggagattgaaaatgaaaaagattgttatgcttatgatcgcagcaattatgacgtttttgcttattgcttgctctgattctcagacacatgatggcgaagcaaagacaccttctgcatcgggagctcaaaaaggaagggattatcagtcagttgttgaagattttgaagaacgtggatttacaaacatatcgttagttgctcttgatgatttaataacaggttggctgacgaaagatggagaagttgaaaatgtttctgttgatggtgatgaaaattattccgctgataaatggtattcaaatgatgtagaggttattattacttaccatacattttcggaagagagtgatttggaagaagatgaggagtcgaaggagtcaataagcgaaaaagccgaagacaaagcagtagaatcgatactcacaattgaaacttgtgctgatctcgaaaaacttttatcgactgaaggagaaataaacgatttttatttcacttttgcagaacaatataaaggctcaacgatagtattcgatggttgtattacctacattacaaaccatggcgattacgatactcgatatgatatttt
